United States Patent Application Publication US 2026/0357256 A1 - sequence listing, part 26

SEQ ID NO: 9 - DNA, 58617616 bp, Homo sapiens (residues 54,275,576-56,446,598 of 58,617,616)
  source 1..58617616: mol_type = genomic DNA
gtgtctgcagctcccatggggagcctgatccacagtgagctccctgggaacactcactggttgaatgaatgaaggggagcccaggggaccggggtggttcatttattcctcatcctccagaggcctggggagcgctctaacaaccagacggccaaacagaggatgaggagcaggaaggggacccgggaggaggcccacgaggtcccaggacagcaggagagagtgaggtcacagcaggcgggaggcagcgtgctggacaaggaggggtccaccgtgacgatgctgagagccgggggaaggaggacagagaagtcctgctggattagatctggcaccaggaggcctttggtgcctgggacaggggcggggtctcacccgagtgtccatctccaccccatcttcaggctgtgtgtccttcacggcagcatctgctggggcagagcaaggggttcgtctcttgggaaggttccctgggacctctgagtcctgccagcccctgccctgctcccagatggggctactgagatgcagggaggggctgcaatgtccctgaggtcccacagtgtggggtgagatgatctcaccctgagccccagaccctttccagccggtgcccctttccccattgctacggaaacttcggggcccctatctccctcctggctggtcacctcttcctctcactcacagaggttttcttcctgggcgtcggcagctgggctggacctgggggaggaatgggagctttaggggcagtgtatgggccacgagcaggtgggagtctggggtcttcgggcagaattacctccactgcaggcctctgtctgtgggctctggccccacagcccctgcaggatgttggaaatcagcctttctctgggctgggggaagaaggacagagcctcagccctgggaacattggagccccctgccctgcacacacagctcgaaggtaaggaaggaaacctaaaaacactcctgcctccatgttccaaatgcctcatgagatggacagagtccgaaggacactttacatttgtagatgggactgagcccggaggacactttatatttgtagatgggactgacgttaagtgctttctccattcacctggtgagaaatgctggaacagtttctcaaagctgcatttgcccagtggtttggattctctttggctgtgccctgagcccaccctcggtcggcccacagggtttccccttccctactcactcgatgtccagtgtttgccctgacgtcgatgtcggaggatgaggaagaggaggaggaggaggaggagcagtaggacgacggccaccaagatgccgatcacaacccccaggtgccttcccagaccttgagcacgatgatgtcagggatgggggtgatgtcattgaaatgagcgcctactgtgtgcaggtgactgctggaccttctgttcaccacctccaacccccacaacagtcgtgcagcacacaaacatccaccccacccactctacagatgaaaaactgacgctcagagaggggaatcgcctgccccgggcccccagccaggaagcggcagagctgggaagggagcctgggagtctgacctgcagcccttgttcctgcaccagagccgagccccggagctgcagggaaagagccttaccgtcctgaaccacgactctgctcccctcccctgccccaggtcaccgtctctgctgcaggtgggacgggacaggcccccgcggaatcgagtcttggagtcttccctgaggggcctcctctcccaggaggtcacagctgggagtgagagctgaaaggaactttcccacctgcaggcctctctcctttacacttggagaaactgaggcccaggcaggggaggagcctgtctacatcaccacctccagaggagcctgaacctaggacagaacccacccctgcctccccgggaccccgcccacctcccactcagagcccctcactcaccactttggggatccgacccagtgggggtgaggggctggtcctcagggcctgctgggtcaggacggggaggtgagggctggggctgccctgctccccacatcagcccggctgctcctcccccaggctgggccccaacatttctctctgccttgaccccccacccctcaccagcccagcctcagagccctggggaccctgtggcccctcctctggctctgcccagctccctggacagaagcccttgattgagtccctgaagggaatgggatcctcctggacactcaaagctgccctgggggtcgctgcgctcccttcgagccagaggcctcagggactcaccaggtgtggagatgggaccggtgggtggggggctggaacccatggagggtcctgggtgaaagaatgagaggagggtgaggagctggggctttcctgaagtctccacctcaaaccaaatttctctacatgggccctgtggcctccccaggcccctccctccacccgcctctcctgtccatgatgctggcgatgccgctgagtgtgcgcaggcctgggagggcctgttgtcctccttccctctgagggtgagtctcccactggctgagccccgctcagacccccgctcactccatcccagcccagagctctcctggggggcagggcctgagctgagcctttgagctcagagaggacagggtcaaggcccccacctgagaccacgagctccaggggctcactggggtgagacagcaggtaggggtcggagttgagtgagccgtagcacctgtaggtccccgcgtgggctgaggtcacaggactcatggggaattcagcctggtacttaggatattcgtgtattgatcttagacggagtggggcatcagctgctcccgccttggtcagaaggaaagtgtggaactgccgccatgactgacacagcagggtcacgttctctcctgaggccactgtggggcctggctgcactgagatgaagggtgtgccacggatctgtcctggagagaagaaggatgggtgaggggctgccccaccttgctctgagctgagacctccccaggcctctctaggagcctctgtctctgttttctctgagtcttcccctccccacccatcccctgtctctctctctgtctctccctcccttgggaccaccccccgcctcatcctggccatcactaattggattcccccggcagggcctgtgcagagtctgggtccctgactgaacccgctgggctcctcacctgtgatcaggatgtccagggggtcgctgggggccgagcactcagaggagaggttgtgtgcaccgtagcatctgtactggcccccgtaggagcggctcacagggcccagggtgaagttggcctgggagagcccagcctggggctgccggccagggagctggcgaaggtcacgttccccctccttgtacagaacaaatctgtcatagccgacatcagagacacactggagggtcaggctttccccaggggccatgacaggacccggctgcactgagagtgatggcttcttagaaacacctgggaaaaggtgctcatggtttccaggagccgaccctcaggcttccccacaaaccctccctctcccccggtgcctcaccactgctgatcttcctgtgtctctggccccaggacccctgagccctctcgccccaacatcatcccacctggaactgccctgagacacggctgctccccacctgcctggagactcagggagactcagggaactccagacaatgctgtgaatttctcacctgggaccaggagctccaggagatcactgggtgaagaccacacatagggagagttcaagtcataaccatagcacctgtgcgaccacctgcgattcgggctcacggggcccacggagaagatggcgcgggacgacccacgggcatggggctgggagttcaggcattgtgggtgttcatcttctccttccttacacagaatgaagccgccaaatgccacctgtgactcacactggagggtcacccttcctcctgaggtcaccacagggctgggctgggctgagagggtgggttttgggtaggctcctaggagagaaggaggcatcgtgttaaatggggctcccacctcccacatcatccccagggctgggctgtgagagggagacacccctgagagcctccttcctgagggcagagcctggggctgggatccctgagtgtcctctcacctgtcatcaccagcaccagggggtcactgagctcagaccaccgagcgcggctgtaatactgacagccatatcgccctgtgtgttcccaggtgatggatgggatgtggaactggccgttcttcacaagctctggtcgtatccgtgtaatccaagatgctgattttttctccctatatagacggtactcctgggcttcaaggctcccctgacaactgagggtgacgggactcccctgggtgatcacagagtctggctcagcccacagggtgggcttggggatggtccctggaaggaaatcaaaggtcagattcgaagtcatttcccacccaacagatctcagctctcagcccaggaccctccagatgcccccatcagtcagtccagaacttctaatccccatccccagctgcacggaggtggccccttgtccccagtgaggaggagggacctgggagagctggggacagactcacctgtctgcacgcgggtcctggggcccagactcagccctggaagagagttccctgtgagggatttgccccctgaagcctgagcaggtcctcccctccctgggatctttgtgagcccctggggtctccttagggaccagagtttggctgtggggtgaggtccctcctaggttagaagctcccctctctcttcaaatctcaccgagacagatcaggactgtgacgatgggggtcatggcgtctcctcccactgccctgctctgcggatggatgagccctcggtgctggcgggacagagacacacagagagaaatagcctcccctccttcccaccctgtgtggacactcagaggctgggtccttctcatggggtgttgtcatctgcagccacacaagaagcggaactgccctcccaggagcctgactctcattcttttagagctgaggtgggggcaggcactgggccctctgcagacatttcagactgtaatggggtctttcctgacccccagccactgtctgtctggtttctcctcgtctcaccgagagccgggatgtagcagcaaatagaactggtgcttcttgtgtctgcccttcctgatgagggtagcagtggcttccccttccttctcacagcttcccacatggtcaccctccctccttcagcccatccatcagcacagcgttgtggggtccttaccatggcagtcgtccctccagccctggagatgcttcagggaagacccaggtccatgctgcaggcagactcagatcagcagagaagcatctcgcctctggctgtgctgtccaggttgagctgtgtgtggcagtgagcacagaggagaaatgcagggaagtaggggaagaaaagttgacttctttcttgacactggattgtgggttttctttcaaccaaatagtcccctcttaacttcccctttttaaatgtttttgctccagcgtccactccctcccccccgggaagaaacctctgagtctttcctgcctcctcggtgcccattgcgtccttagccgtccctctgcacctcaattcctggtcaacattttgggaacaatgacttatgtttgagctttgatttggggagtgggggagggagttgatatttatttgatgactggttatcatccgctgcctacgtgaccttggtttgtaatgtcccatcactgagcctcagtttcttcctttgcagattgttgtcatgaatcccactcgtcacagtggttgtggggtcagtggtgcctgggacattgggaggggctcatttgtgcttgatttccagaccagggtaagacctgaggctttgggacgtgagaggatcttgctgttggactccacattctgtaggtgattgatgagtccactcaagatgtcacatctgaccgtaatggagaaacgtatgtgtagcatttctgaaatacccagagtatcaaggtcatgagcagaaaaagacatgtggaaaccccaagtgtagacggactcacaagaaagaacagaggccagaggtgagatgccacagggtcccgggaccatcaagggctcattagggtggaggtttccaccactgagtggagccgggagaggaaccccgggatctgcaatgacagtgaggggctcagggctccagaccaaggtgggaggctgcgtcctctagctacacctgaggctggagtggaccccaagcagcccaggggaattccctcaagggagtgcaccaaactgtccagacctgctggaattccaaggaaagaagcactaaacaccagggtgttcatagagcatttattagggggacctctgcacagtggggcatccttgtcttcttgcccagtgtctccttgtggatctcaaggatgtgcttccacatagcagcatgttcttcagatggacaaggagacactgggtattctatccaaagctttaacctaaaataaaaacaaaaccaaaaataaacccctagaaaatatgatctctcagtacagttgtttcttgggatacacaggcaattcgtttcagtaccccctacatgtaccaacacttgctcgtactccagccctgacgttgtctctgctgggtctgcatataggaaaagtctgccgttcatatacgcaagtcttgtttctcacaaatgctatagttttgatccccgtttgtttggaaaaagtgtgcatataagagacccctggaattcaaggctgcattgctccagggttgcctggattttgagtttatttgggagtgagaagcaaggattacaatatggagtgcatggcatggcaagccacagtgtgtccagagagggaagtgtgatgttgtgatatatgctggttttcacccgcagttcctggcttgtaactcccatagcccttgttatagtcttttgttataacattggctgtgctgggcctcaggggaggcctctgacctcctcctgcccttccttcacctaacccaaagtaagactcgaatgttccctgcctttctgatagtggatcttaagaccctcccagaagacagtctcaccctgttccttgtgggaggaaatgctgatgtcatgaagctttcataaaagccccagaggactgggtttcatgagtttctgggtggctgagcatgctaaggctcctggagggcgacgcccagggagggtatggaagccccgggcctcttcccccatgcctcctcctatgagtttcttcatctgtgtcctctgcagtgtgctttgtattcaaccaggaaatgtcagtgtttcctgagttctgtgagctgctacagcaaattaatcaaacccaaagagtggggcatgggatccccaacttgaagccagtcagtcagaagttctggaggtctggacttgggaatggtgttgggggcagttttggggaatgggccttcaatctgtgggatccgggactgtctctgggtagacagcaccagagctgacttagaggacacccagctgctgttcgctactgcgtctggggaaaaaaaccccatacatctggtcctagaagtctttttctgtgttgatgattcctgtgacgtgagagtagaggaaaagcaccgtagagagagctctctgtacatagagaggtaaaggaagttcttatcagcaacaagggagagcctgacagagctgcctggaaacagagttccctggttccacaggttcaaagccagagttgctgtcagtccattggaggagatgctgttgctggtcaatggttctcttgagagcatcttatctgaattcctgacgtcctaaagaacatctagtgataaaccttgtcaaagcagaaggggctgaaggacatggaagagtttcttatgggttttttaaaagtccttagaaacagttcttatctgagacgtggaagcatgggcctcctctccttcaggccttcctggccctgtggggtctgagtttgaccaaagtcatctcatccttgcacctgtaacttttctattgggagtctgcagtgaagggatggggttacgaagtttaacctgagagtttcaggaatttggttcaggggagggcttgtttctacacttttagcaaaagggttaatttttcagtgttttctagaaacaacctaaagtgctttatcagtacttggggatgctcaagacctcagcttgggttccagcctgcaggtggaaacatgcatctgtccaacccacagaacagtcatggccctttgtctcactctcagaacaaggaaaaaagtggaggaaactgtgggaccttagagactgtgactccccctcttctgtgtttgtggacagaccctgggatgactcagtgacccgggctacactcagcactgagccaccttcccgggtgtgcatgacacagatgcgctttatcattgttggaccgggcatctctgaccctggagtgtgaggctcacatggaccccgccatgccgggcataacacagaggtgattctaagcttgggagcatggacaccgcagggcaggagcggctacagcaatgccctcatcagctttccttcctgagtcagcctggggagaaaccctatatggaagatcaggtgtgtgggagaaaaacccaccccagaggaataaaaatcaaagagtccgttagagaaaaaacaggcaattgtagaaatgaattaggaagctattgtgatgtgaaaatagtaaattatattaacacatttagaaataatttcatccagaacaagacacagctgaaatgataaacattgtattggtgtagaatatttactaaaatttttcattagtcatcagagaaaaactagaaatgaaaaaaatagaaaagataattaatgcacacaagaaatggaatgaaaagaggaaacagatatctctctttggatcacactttcagaatgaaggaaataaggagtatgttattcagtaaatacttgcaaagaaaatggttgacatttttatagaaatgaagaaagaacatgagtttaacgtgaacaaattcataaataacatcaatgtcttaactatgatagagtaaaagatacctagaatagatacaaagtaattttaaaactactggagaaaatgaaaattattgtccaatgaaagacaagcacattgggactggatttcccaagagtaaaaagtgcaagaaaatgactgggggctgaggttcaagttggctgaatggaaagggctggagtctgcctactcactaagaggacccaaaatagcgagtaaataccaacaggtcaagtggatcttccaagaggatgctggggttcacctgagaaacatgaggacatggagagaagagaagagaaaaggtgggagccaggagaggctcctaacacggggaaggggtgagtgagtgagagattcaccaacacggggaaggggtgagtgagtgagagattccccaacacggggaaggggtgagtgagtgagaggatccctaacacggggaaggtgtgagtgagtgagaggatccctaacacggggaaggggtgaatgagtgagagcctccctaacacagggaaggggtgagtgagtgaggggtccctggcatctacacctctgctgtgggcccttaggatcctgcccacaggagagcgcctgtcccctctgggcctccagaggcccacagtttgctcctggagactgtaccaaggccccactggagcccacgtggaatcccacaggcttctgatccctgagcagcctgggtccagctgccactgccttagcagggagggaggaggccaggcacctctgtgggccccagaataagtatgacagctggggcacaggagcagccaagctgagcaccacacagctgcccacctctgttgcttcctgcgaaatggggcttccttcctgctaatggggcttgccagctgcagggccccagtcacccgtcctgcccccacccgaacaccgtggccctggctcggtgccctctgaaagcccaatgctcagaggcccctgacaagccctttgcagtcactgccacctctgcctctgcccctgctgccccaggcccagggagggtgtggggaggcctggcactttcacgtgtccccagagcaaaaccgagtgacacttcttcaggagggaagtgtgagcgggccctgtgcctcacagctgccagtctccagtgccccagccgaggggcgctgccctccctagtgacaggcccacagcacagccaccctgcccccacctggacatttcagctgcagcccccagcccttctgagagcccagtccccacaggcctgtgatctgccgcaggctctaccacctgagccttctgcctgccccgcctgaaggttctgccggtgacctggggaccagcccatccctccccatcacagccagcatctgaaccccggagcagccgaaacccagtccagccccttcaggactcacacacgctgtccagccggccacctaggggcctgtgatccgggaactacctgccctttcctacctgctggcacctgaccactcaccccagggcctgaggtcgggcccacccagccagcaacaccaccacaactgacgtccactctcccatccagagaggcagaagccccacatcccacctacatgaagcagctaccgcgtcagacaacagacagccgctcagggtctgcactgggctgagggaggaggctctgccttggaaccacgcctgcagagagtggcaaggcaggtgtttcccactgccctcagccacactgtggcctggggagagacaagagtgtgtgtctgaactgagactcatgagccctggagcacgggtgtgatagggagacagacaacgttcctccctatgggactggaaacggtgtagctccttcactccccgcagagacctcagggcatttcactaggagctgctccagccatgtccatcaggactagtgcctgcactcatcactgggatatctgtgggcaagccgggggttccagctctgcccaggggtgttccctcgcccctgtggaacaggaagctcagggcacctgacactccacggtccagcccttcccctgaaacaagagtcagcacctcacaggaaacacaccaggtccacatccacctgcttgtgccgagcgtggctcttacccttaagcaccagctcctggcctgcaatctgagctgcacagcccaatgcaaaccctgctgcagaagctcccaaagccatgggaaaagccaaaagacccttcccaacatgctctacagtcaccctccctgcggggctgggggaaaatgtgcaaaagaaatcccatccaaacgaaaataaattcgaagagagtaagtggaggcctctccagatgagaaggaatcagtgtaaggattctgacgccgtgaaaaatctgaatattgtggcaccaccaaaggatcgcactggctcgctagtgatggatgctgaaaacaatggaaactctgaaaggacagataaagaatgagactgacacaaaaacattacaaagaatcaatgaaagaaaacgttggttttttgaaagtataaataaaattgagagatggctgactacactaaccaaaaaaaggagatttaaataagcacaatcagaaatgataaagttgacattacaaccaacaccacagagatacaaaagatcatcagagactactatgaacacctttatgcacataaactagaaaacctggagaaaatagatgaattcctagacacacacaacttcccaagattgcacaggcaaaaaatagaaactctaaacagaccgataacaaccaatgaaaaaggatcagtactaaaaatcttccagcaaaaaagtccaggaacagatggattcgcagttgaacttagctgtatgtacgaaggagggctggtaccaatcatactgaaagtattccaaaaatcaaggaagtgggattctttgccagctcattttacaaaatcagtatcatcctgatagcaaaatcagacaaggatccaacagaaaaataaaactacaggccaagaaatctgaggaacacagatgcaaaaatcctcaagaaaatactagcaaacggaatctaacagtgtatcaaaaacataattcatcatgatcaagttggcttgattccagggaagaaaggatggttcaatatatgcaagtcaataaaagtgactcatgacatgaactaagaacaaaaagcatatgatcatctctatagatgcagataaagctttcaagaaagtccaacatcgcttcgtgataaaatccctcaacaggctaggcatgaaagaaacataccgcaaaataccaacaccccctgcgtgacaaacccacagccaacatcaaattgaatggggagaagtgaaaacattttcccaggaaaatgagaatgggatcctccctagcccctggggtctcctactggaccagggcctatctgtggggcagggtccctctcatgctagaatctccctttcccctcgtcaaatctcagtgaagtggaccatggccatgggagtgacagtcatggcacagagaggcagggctctcctgtagcaggacgagccgcagacaaaactcctcagacaccggattaaagaaggaagaggtttttattcagctgggagcgtgggcagactcgcgtcttaagagccgaactccccgaaaaagaaattcttggcctttttaaaggcttataactttaaggggtccacgtgaaagggtcgtgatacatcaagcaagcgtgggaaacatgactgtggggggctatatgcatcagctaacagaacaaaaagttttacagtgcttttttcatgcagtgtctggaatttacagataacaccagtagtttaggtcaggggttgatgttattattattactttttttaactcctacggccgggtggtggtgccaaggttgtctggctatttatcttacttttgtatttttccaacttttggctttttctctcttcctgttttgtgaactaggcaaggtggggggaggagggcagcaggagtagtagtggtctccttccttactcccacttacaggattttcccaccagcatctccatgggtggtgagctgtcccggaccccgctggctcatgttttcccaggacttggcctttctcgaatgctttatctgcatcgcttgagattatcacatgctttttgttcttagtttatgtcgtgagtcacctttattgacttgcatatattgaaccatcctttgagacaggcaccaggctttctgctgatatttcagacacgcatggcatctctcctgatctcctttcactgtctgcctgacatgtcctcgtctcattgagggccgggacgtagctgcaaatggacgtggtgccttcctgagttggtcccttccaggtgaaggcaacggagggttcttccttcctctcagagactcctcgtggggtttccctctctccttcagctcacccataaacacacccttgtggggaacctaccatggccagtcttctcaccagtcctggggaagcttcagggaagatgcaaattcaggctgcggggcagactcacatcagcagagactcatctcgcatcttgctgtgcagttccagttgagctttattgtggcgatgaacagaaaagggaaatacatggagacaagggaaggaatcatgactctttccccagaactggagtgtgggttttctttatgcaaaaacgttcccttcacgaacttctcattcactcatcgcaacagcatctgcccccgtctccctggaaacaacattgacctgactctgccttcttggtgcccctgtcttctttcaaacactcctgttcccatcctgtgctcctgagttcaaggttctgggacaatacgtggggttagcactctgctttgaggggaaatcttgtctttatttaaatattcatgtgtcaccccctgcctgtgtgaccttgggcagtaacctcccatttctgagcctcggtttcctcatttggagcctgtgatgaaccccatttatcacaggggagctgggtcattggagcctggggactgcagggggctcagccatgggtaatttccagagcaggtgaagacaggaggggtgggggcatgaagggatgctggcgcccaccatcaaggcctgagattgatgtttccactaaggagagcccctttgttcctgcccttgagagatgcttctcataatatttcatcaacacccccgttatcacagtcatgtccagaaaatgagaaatgaaagcttgtcagaaggagaagcgcctgcattaaagagaaaattaaaactgacagagcatttgtgtctggtgccattggggtcttcagggaggaagtaattaagtcactagtgtgcatacatttaagcatgaaatgcaaatcttttttttttttttttcgagacagagtctcactctgtcgcccaggctggagtgcagtggcacaatctcagctcaccgcaacctccacctcccgcgttcaaacgattctcctgtctcagcctcccgagtagctggcactacaagcacgcaccaccacacccggctaatttttgtatttttagtaaagatggggcttcaccacgttggccaggctggtctcaaactcctgccctcacctgatccgcctgcctccgcctcccaaagtgctgggattacaggggtgggccaccgcgcctggccaaaatgcaaatcttgacctctcatgataaactgaaaaataggagtaaattaaaaaatacatatgctagactgaattatgtaatttaaaatgcatttttgtgttttgtgattttcaactcaacatgtcaatagcattgcttctcagtgggactggacttcccgatagtaaaaagataagggaaggagatgctaagagagtactctcaggggactaactgcaagtgaggaattctatacttactcaggttaatacctgaaaggtaaaggggtcagcaggggaccaattcctaaacagaagaaggctcagggcaagacggacctgtgaagctgtctggttgggcttccccttcgtgagggctgaggagggattggagggtggatctctcaaatcatcagatgtgctttctcttccaggtgttatacttaccctttaactaatacagaaatgttttcatctattttgatagagagagtgggaggaaaaagaaggcattttctgagctgcaagttactagatattactgttttcatgctcagtgaagg[187 bp omitted]tggtggtgggcgcctatagtcccagctactcgggaggctgaggcaggagaatggtgtgaacctgggaggcggagcttgcagtgagcgcagattgtgccactgcactccagcctgggcgacagagcaagactccgtctcaaaaaaaaaaaaaaaaaagaatcaatgaatccaaaatgtagaatatgagatgccacagtgatgtaagtgagaaacaggcaagtatttgaaaatcacacacagacatgcccacatgaatgcaaccacacacgggcacacatgtatgagtcagtgtgcatgtacacatgtgagtactcagagttcagctacagtggaattagaacgtgtcttctctaaaggcaaggataaatgaatcctcattcgaaaatatataattgagtgaatacttaactaaataggtgaagttattccaaatttttctttttttttaatcctgtatgtaaaagagtaattcatccactgaaggataagttaaatagcccagtaccccaatcacacctaggcatgaaacacaatagtaccatctaaaatgaaatgataatttacaatcagtaagtgaagaaaggtatactagtaaaatatctattggaaatattaatattcaacaaaatgtaacataatccaaaaagttttagaaataaaaactaaaattttgtgttttaatgaagttgtaagggctgggcatgaagggatttgcaggctgagcggggaggatcacttgagcccaggagttcaagaccagccagggcaaatagtgagactcatctttatttatttttttaaaaaaagaaggtattaaagatgactgggaaaaatcactgtatgaaaaaccgaggaagaaggaattagggctcccgaatggggtgaagacccacatgcagaatgtctctgagccctgagagtggagcagtgtgttcaggatcctgagcctgtggaaccaacattctctgagatgtgagtctatggaatgtgtgttataagacctgccttttgttagtataatccagcaaaagcccatgggcgaggacccagttttattttagggaatgtggggacagtatattttctatttgtgtttatgcaaatttcatattgctgatcagtcatgcagaaggcggaggtcagtgtgttcacaggattcgtacccgagagtctggagacacatgtgggggtccatgggaaaggctggtggccgggtatggtgggaaggtaatcagcgacagatgccagagtctcctgcttgatcttgccgaaatctggctcaaatgtttggcctggcacaaccaaactagaacttggaagacgctgtataggtaaaacataatattgtaatcattcatattctgttaaggctttgaaaatgtccttaataagatttctttatcctggaaggtagatggcaaatgataacatttctttattctagagggtagatggcaaacgataagatttctttattctagaggttagatggtgaatgatatgatttctttattctagagggtagatggtgaatgataacatttctctattctagagggtagatggtgaatgataagatgtctttattctagagggtaactggcgaacgataagatttctttactctagagggtagacggcaaatgataagatttgtttactctagagggtagatggtgaatgataagatttctttattctagagagtagattgtgaatatttggtccttcatgttttctcaggatcctccctccaaacattctatcctatacagcaaagctttacatccttcaaacacaacagtcgtcttggacctagatatgttgaactctttaatgctaggactcaagtcctcttgctgtttgggacaattcagaaaagaatcagccccagtcattttgcatacttctgtctgactgtcataggtgagtagaaagaaacagctcaactgcttgacaagattcatcgacctgaggtcttgtctgcagctggatttctatcctacttccgtgattttcctttcgtggatcaccaacacactgcaaatgcctatcattgcttttgacgtggtgtactttggttctgcctggaaaggcaggaagtctcgaagtgaggagctcacaggtcaaaggagattgaaatgttttcagacagaataggcaaatccgtagagacagaaagcacacttgtggttagcaggtgctggagggaagagggaatggggagtggctgctgaatgggtgtaggatgatgacaatgtgtggaacaggatggcagtgatggttacacagtgatctgaggagaagatacacaggtagcatctgagaaggagggaagggcttgtagggtttggagagggtgtcagggcatcagggtggatttatcttttcctggttgaaatctgatactctcccattgatttagttactgaagcacgtttggaactctgaactgaagagatggaggctcaataaagcacaccagggagtatggcaatgaggaataaagaagactgtgttacacaccatggaccagagcacacagatgtgcagaggtgtggatccagccctgccatgtgggatgtagcctcatgtctaggggtgggaaaagaaggggatccaaccaagggaagtcaacattaatagagaggaaaggtatcacatgttaatggtcctccatggatcaccctgcaaaatatctctgcaatccaacactgattcctccttctagaaattatcagcagacagtccagatagcattggccctaaattgtctcccggaacctcctgggatcaccatatctattcccaaggtttcaccactctgagagatgcattgtcctctctgctgttcacctcctagctgcatcttaggggcttctctggctgtgctgagcctcaaataacagaatcctgaggaccaccaggatcaagccagccttgcccatgtggatgagattctccactgtgtaatcctgggggtgtgaggttggggatggtgggcaaagagaccacagaggtcagggcagatcaacatcacccaggacctctggatgtccacccagggcacccacctccccttcacaggacctgaccctctgtgccagccccataactgaaagcatctcctcacgcaccagtcttggggtctgaattgttttgtgatgggctgagggtatcagctgctcctgagaatcaaagcaaaggagaagtaccctgagccagcctctcccatgggctcggcattcttatcttcccctgtctcctgacatgagttctaaggagttccttagtaaactcttcctctgtagcagtgttcgttccgttcttcttaatgaattatttcagctttcctgctttctacaaatccaaatgttgctcttgagtcatttgggggagagttttccttcaccctgagggctcaggatctgcaaggaaagtggtccccagtacagaggtcactgagccctgtgtgctgtctgtgcagcctgggacacgggagcacatgagccaattcccccggagatgagagtttcacggatccaccagctgaggacccaggctccctggatgaggggttggtcctcaggggctcccgaatgtcagaagcacaaagcggtgaaagtctggggctgcctccccttcacctgggttttcattgtccaattaatctaattaactaattcttcatataatcaggaaaacctagaatgatgtgataccttccccccggcccccatccaaaaatatctgtctgctaaatagtggtgctattagaggttcataaatcagtatttctgcttttacaaagtgtgaatctaggtgaatctagaccagtaacaaacatgtaaactcctaccacatcaaatgtcttatttatttatttattatttttattatttatttatttatttattgaggcagagtcttgctctgttgctcaggctggagtgcagtggtgtgatctcggctcactgcaagctccgtctcctgggttcaagcaattctcctgccccagcatcccgagtagctgggattacaggtgcacgccgccacgcccagctactttttttgtatctttagtagagatggcggtttcaccatgttggccaggctggtgtcgaactcctgacctcatgatcctcccacctcggcctcccaaagtgctgagattgtaggcatgagccactgtgcccggcctatttttatttttattgagatggagtctcactctgtcgcacaggttggagtgcagtggcactatctcggttcattgcaacctctgccgcccgggttcaagtgattcttgtgcttcagcctccctagtatctgggactacagggccgcaccaccatgcctggctaatttttttttgtatttttagtagagatgggcttttaccatgttggccaggctggtatcaaactcctgacctcaggtgatctgcccgccttggcctcccaaagtgctgggattacaggcatgagtcactgcgcctggccatcaaatatattaagaatatggatatatttatcaagtgaacttggaaatacttacacacatattcaaatgtaacttatataaccacacataaatatgtatagatgtaaaactttagatatttaagatgtagttacatacatattgatatttgaagtgagaaatattggcaagcaatatagaaataagtaaaatctccattgtctcatggtttgtatacatttcatcaggaaattagaggagatccatagaaaagcaattagaatggggtaatttggtagtgagttagcatgaaatacaatgaatatactcaaacgagtagctttctcatggataattatcttttatttttaaaatatgaaagaataaagtacttcacatatacattgttaaaggtgttgaataattcttcaagttggaatgaatataattcttcaaatgtccacccaggacacccagctcctcttgacaggacctgaccctctgtgcccagcgtcatcacggcaagcatctcctcactcaccagccttggagtcggacttgttttgtggtgggctgagggtctcagctgctcctgagaatcaaaacagaggagaagagacatattcagaggtaactcatatgacaaattattcaacacctttgacaacttataagtgaagtatttgattcctttatattttttaaacaagaggtaagtacccatgagaaagctactggtttgggtatattcattgtatttcatattaacttattaccaaattgccctcttctgatttaaatttaaattaacaattttaaagcatctctttttcctataaaagaggtttagttagatgtcagaattatccagtgattggacaacattggacatgaaccccccaggcccagagctgggctgcactgtagcccccgctgacctcccccgggtttcccatgccacagggagccgcccagtcagtttccctcgggccactgtgctttaaaacatccaaacacagccgggcgcggtggctcacgcctataatctcagcactttgggaggctgaggcgggcacatcacaaggtcaggagatcgagaccatcatggttaacacagtgaaaccctgtctctactaaaaatataaaaaattagccgggcgtggtggcgggcgcctgtagtcccagctactcgggaggctgaggcaggagaatggcgtgaacccgggagatggaggttgcagtgagccgagatcgcgccactgcactccagcctgggagacagagcgagactccgtctcaaaaaaaaaacaaaaaaaaagaaagacagcagattctaaaacagtggagatggaggttgcagtgaaccgagattgtcccattgcattccagcctggacaacactgtgagactccatctcaaaaaaaaaaaaaaagttttgagtggggtgtggaataggggaaggctctgcaacagatccaggtcctgcacaagctcttctgccacctgggccatatgatccagtggaacagatggtgcttgaagtgtcagtggcagatcgagatgctgtttggaggttttgacaagctccttcctataggtgaattggggcttagacacttaggattgtggagcaaaatcctatcatcattcacagatagctagtctccttttgaaaaacatatatttttttttgccgggcacagtggctcatgcctgtaatcccagcactttgggagaccaaggtgggcagatcacctgaggtcaggagttcgagaccagcccggccaacatggtgaaaccctgtctccactaaaaataaaaaaattagccgggcatggtggcacctgcctgtaatcccagctacttgggaggctgaggcaggagagtcgcttgaacccaggaggcggagattgcagtgagccgagatcatgccactgcactctagcctgtgcaagaagggtgagactccatctcaaaaaaaaaaaaaaaaggaaaatattatatttttttccattattgagccttaggagagactggatgcttgggcacaggtcaccaaggtaccatgaaatgtgaagtgtgtgttagccgatgcaagctgtataataagatcatgtccactcaggccctgaaagtgtgagcaatttacacaaagcagggggccaaatgcccatggttcctgtccctgctacacaaccttctgccttccagcctgcacctataatctcatggggatttctctatgctccgttgacagagaaagtgaagactcaagcctggtttgcagatggttctgcacgatatgcagacgccacccagaggttgagagcttcagcacttctgcccctttatgggacatccctaaaagacagtaaagtcagggcgcaagtgacccccttcctgaggacagagcctgcggctgggcgccttgagtgtcctctcacctgtcaccaccagcaccaggggggtcactgtgccctgaccggcctgtggcactttgataataacagtgacagttctctgcattgtgctctggcttgtgtgagatatgggtcctggtcttgttcccaggccccagtggtttccttaatgttctgtgacactgagcttccctctttatccagctggtgctcttggggctccagggtaccctgacaccaggtggtcacaggcctcctcccagggatcacacagtctggctcagtccaggtggtgggtttagtgaggagccttgaaatgaaatcacaggttgggtcccaagatactaatgcattcctcaaatcccagctgtcagtcccaagacccgcccagatgtccccatcagtcagctcagagatgctgttctccatccccaggtggctgggggtggcccgttgtccccagtgagcaggagcgacctgggactgctggggacagactcacctgcctgcacatgggtcctgaagctcagactcagccctggaagagagttccctgtgagagatttgcccctgaagcctgagcaggtcctcccctgcctgggagcatcctgacccctgagatttcctgatagaccagggcttggctgtggagtgaagtcccttcaagactagggtgccccttctcctcttgaaatctcaccaagtcagagtagggttgtgagggtgggagtcacggcatctcctcccactggccccagctgtacagatggatgaaaccatggtgtccaggaggacagacagacacactcaaaggctgggttctccctgtcatggggttgtcccatcagcagccccacaggaaggggaactgcagaagcctggctctcatttccccagggctgaggtgggagtgagcaccaggtttcctgaagacatttcagacagaaatgggctccccctgatccttggctactggctgcaggatctttcctcatcttattgagggctaggatgtagtagaaaaatgggcccagggcctccctgagtgagcctcttccaggtgagggtaactgagggcttctcttcccctctcagagcctccacatggggtctcctttactccttcatcctgtctatcagcacggggttgtggggtccttaccatggccagtcatctcatccgtcgtggagatgcttcagggaaaatgcaggtccatggtgcagggcagactcaggtcagcagagacgcatctgacatcaggctgtgtagttcaagttgagctgcactgtggcaatgagcgcaatggagaaacacaggaaatatgggtagagaacacgacctgtatccaacactgccagtttgctctatcaacccgtgccctccatggactttccctttctcttagcagcagtatccaccttcgtctccttggaaacagacttgtgatccactcctgagtcttcagtgtcctttgtttccctgaggggaactcacctgttgggatggggagctgatttttacttaatgattgctcattatctgctgcccatgtgaccttgagccttcacaaccccttctctgagcctcagtttccttgtgtggagcaagttgttacacaccccactcatcagaggggtcgtgggggtcggcggtgactgggacttcgaaggagctcaatgatggttaattcccaggacagagtaagacatagggttgtaaatttgagaaaatcagggtgttggacaattgacgctcccacccaagaatcctcatctaccctgagcactaagaaattgtacatataatattgcttaaatacacagattatcacagtcatgagtagaaatccttccttccttcttccttccttccttccttccttccttccttccttccttccttccttcttccttccttccttccttccttccttccttccttccttccttccttcctccctccctccctccctccctcactccccccccctttctttctttctttctttctttcttctttccttttttttttttttttgacagagtctcactctgttgcccaggctggagtgcagtggcacaatcttggctcactgcaaccaccatctcctgggttcaagtgattctcctgcctcagcttcctgagtagctgggactacaggggcatgccaccgcacctggctaatttcttttgtattttagtagagatggggtttctccatgttgcccaggttggtcttgaactcctgagctcaggcaatccgcccgcctcgccctcccaaagtgctaggattacaggcgtgagcaaccacgcccagtcgaaggactagtttttaattccggttctggctgtctggttggttttggttttcctcatgtatgtttgctgagaggatctatgtagttgcctgtgatgcccgttaatccaaaattgccacctcactttcatcagtaggtggtatcttaggccatcgttatataagagtaacttttttttcactttttggaaaatattttatttgccaaaatacatttgagaaaaataatgttgattatacaagcggataaagcaattgtcatatatatatacacacatacacacacacatatatacatctatacatatacacatatatatacatatacacacatatatacgcatatatacatatatacacacacatatatacatatatatatgtatacacgcacacacacaaatatatatacactgtggaatactactcagccataagagggaacaaaataatggcattcatagtgacctggatgaaattggagactattattctaagtgaagaaattcaggaatgaaaaaccaaatattttatgttctcattcctaagtgggagctaagctatgaggatgcaaaggcataagaatgctacaatggactttggggactcgggggaaagggagggaggaggtgagggataaaagactataaatcgggtttaatgtatactactagggtgatgggtgcacaaaaatctcagaaatcatcactaaagaacttctgcaagtaaccaaacaccacgttccccaaaaacctatggaaataagaaagaaaataaaagaaaaatgatgttggttataagttgtgcaaacctgtgtcttaacttgttcattccaccagcataaaatgcagcaacacatgtgcagtgttggccccaggcaaatctgcttgagactcaatgttcaagattgttattaggtggggaccacataggcataatgagcagctacagagaaaccagaggaaaccgggtgttcgccatgaattacactgtttacagaaacagcctagtgaagacataacagcagaattcagtgccgcaggcacacaacctcacgttgtctcttagtaacacaggggacatgctagaagcaagttcctagatgccaaccaagaatcaagctcacaaacaagtccttctaaagttagcatcctcatcactgttaggttaacttcttcttgcatatccttcacctaaaagaaatagtagtcatcttcaatccttcagcacagcgttcacacagcacgtgcctccagctctcccagattcttctagggccagcacagcttttctgatgcagatttttcaaagttctccaaactgaagagtcaatccaaaatcatcttgactttccatgttggcggcctttgggggccttctctggctgtgctgagcctgaaagatcatcccctagagaccgccaggatcaagccagcatggtcattggaatgagattctccattgcatagtctgaaggggcatggtcagtagacagaacagggcattcactgggggctagacaggctgcacccacattgggagcctggatgggtgtttacacattcacactcctgaaagagaagtcgtagttactcctgactttgaaactatacttggtggatgctggttgagaggatcaaggactcctacgaataagagcatgggaggattagagcagctggggccattctactcctgctcccctgtcttggctccttcataacaactctcttccctcttttttttttttttttttttttttttttgagatggagtcttgctccattgcccaggctggagtgcagtggtgcaatctcagctcactgcaacatctgcctcccaggttcaagcaattcttctgtctcagcctccagagtagttgggactacaggggcctgccaccatgcctggctaatttttgtatttttagtagagacagtgtttcaccttgttggtcaagctggtctcgaactcctgacctcagatgatccacctgccttggactcccaaagtgctggggccaccgcgcctggacctctcttcccttctcatgggagaattgtgtaaccatccttgctaacctcaactcccacctcagatggagcactgtatgatttccttcctcaaatttgttcaagttcttgggcctcattgaggtcaccaccaacctctcggtttgggggatattaagagtttagttttgcaaccacaactcagtgacagaaaaaaggaattcaaagatacaggaatacttaactgtgctcctttctcatcttcaatttgttcccatattaggtaaacccgtgcttaaccccttaaggtaaatacctctagtaactcttcatctgtcaatacagaattcagagatgcgtatgtgggactctagattgtaccagagtccagggtacaacagagctaaaggctgtcactgccttttctattgttctgcctcatctaattatctctgtggtccagtgtagcttaatactactactattaaaagtaataatcactgcctcacttttaatgattgggtccactcatctgtcctgttttgcgatgaatgagagaatgattttagaatccaagccttttttttttttttgagacagagttttgctcttgttgtccaggctggagtgcaatggtgcaatctcggctcaccgcaacctctgcctccgattcaagcgattctcctccctcagcctcctgagtagctgggattacaggcatgcacaactacacctggctaatactgtatttttagtagagacagtgtttctctatgttggtcaggctggtctcgaactcttgacctcaggtgatccacccacctcggcctcccaaagtgctaggattacaggtgtgagccaccatgccgggccgcatccaagcctcttttccaggagcaagaaatactacagtgaaaaaaatctcccattgttaattcaatgtagaaactcatgagaaaaaagcaaaaaattttaaggagataaattagaaaacaacatgtgcagatggatacatggacaaaaaaattaagctacctagagatctcgaatgtgtgtcaacctaatacaaggactattagagaatacaggtgggcaagaatcacttaacccactttgtcatggaaaatgtctttgaggatgtgacaggtttggaaaaatgaaaaaatgacaaagtggtcattatatgaagatccagaaaaataatattattcaatataggatcagctgattgaagtattcaacaaatatgcagaaagtttcctagtgtggacaagacttatttgattatgaggaaatttaataagtgctgtgaagtaacatagatctgtattcacagatgtgcaataaattaagtaaaaatcaataaagacataaaatgagaaaaaaacctatctacaataaaaccatcaatctcaaatcattggatggagagaaatatacatatacagaatactctctgagaataactagaataaggagatatgtggccgggtgcagtggctcacacctgtaatcccagcactttgggaggtcg[133 bp omitted]gaggcaggagaatcgcttgagcctgggaggcggaggttgcagtgagcagagatcacgccactgtacaggaagtttcaaacccaggagaggttatctttcaagtactcagtgttgtggtttctcctgccagggtgacaacctgatgattatggaaatctaatcagaaaactgctatcttgcttttattcctacctccacaggatgaaaacagttaatggtagagacaaaatatgtccagagtagacaggagtcacagaaaaagtgaattctgatacgttctttcccaggaagttactggtacagaagtttagaactgagataccttttggaaacaaggatggcattctgcctttgatggatggaagagtactatcccagatttagatagagtttgctaaaggcgtctatcttagagtggctgagccatctccacttcaagctatgactttctgtgaattacccacccacttgtccttcacaataagagcttacccacccacttgtcctacagaataagagggaccttttagtctgctcttctgattgcggacctgattccacaggtgcctggggcatctttgcaatccctaggaatcagcaccatggacaggggcaaggaatagggtccactcctctctccacttcagctggacctcttgttcgttttctttctttctttctttctttctttctttctttctttctttctttctttctttctttctttctttcttttctctctttctctctttttctttcttttctctctctcctcttcttttctttctttctttctttctctttctttctctccttcttcccttctttctttctttctttctttctttctcttccttccttccaacttttatttcagacacagggagtacaagtacaaatttcttacatgggaatattgcttgatgctgaggtttggagtacggatcacatcccccaactagtgagcataatacccaataagtagtttttaaccctcttccaccctctagtaatccacagtgtctatttttcctatccttatgctcatctttttctttacacatttcacctcatactgaccacccagcaggaacaaaatacctcaatgctgcttggaaaataaggctccctcccttcatctctacctttcttcccaggctctctggaaacaacctcttctgtaaagacttcaagggcagaagaataagctgagaaactcagcccagagctgccggagactgtgactcctgtagtctgtgaggaccttgttgctcagccaacatgaagtgagtccatgagggtgaggagctgcagatcccacagactgtttggggcagggacagaaggagtaggtggggttgtggtgcctcttgctctgttcctcagcttcatctcttttgctcaaaggttggccccctaccttttcaaatcttctcattccactcacccagcaccttctgtgacccccgagtagggtaaggcatggagagtgagaatgacccccactttcatgaatttcttcatccctttctgagatgggattgccctatgactggtccctgctgtttttccttccttctatcccaggccggggctctcctagcacagggatgcatgctaaggtttagaatcttaacggatgtggtgcttggagctcctgtactgagaccaaaatctttaggggtcactggggtgtgacaataggggtaaggaggaactatgtggaccacagcactagtaggtccccctgtgggctgaagtcagagggcttggagtaaacttggcctgagagagtaaggccatgtctttcaatcgatggttttggggaggcacaagtgaccggtccttggacagacagaaggtacccaaccagatctctgagtagcactgcaaggtcaagttctctcccgaggacactaagggccctggctcagacaaatggagggtttcttgtacatttctaggaaatatgaaggttgcagtgtgtacaaagcagccccttcccacatgtcctggaccccgaactgagggactggcctcctctctctcagctcctgttagactcttggtgtgggtctttgtaatctccaggcctctcactctccttttctaagttgctctccttggaccactgcctcatcgcatcctctactctaggaccctctccctggaccctcaacccagggatgaccctggtcccaggac[131 bp omitted]aaacccagtcactacaggccaggtgcggtggctcacacctttaatcccagcactttgggaggctgtggcgggcagatcacgaggtcaggagatcgagactatcctggccaacatggtgaaaccctgtcactactaaaaatacaaaaattagcttggcatggtggcatgcgcctgtagtcccagctacttgggaggctgaggaagaagaattgcttgaactcgggaggtggaggttgcagtgagccgacatagtgccactacactccagcctgggtgacaaagcgagactccgtctcaaaaaaaaaaaaagagcgaatggggcttgaaggctacagacaagaggttaggacgccattttggatttatcttttcctggagggcatctgatcttctcccatggatttagttactggttcaggtgtggaactctgaactgaagagatggaggctcagtaaagcacacagggagtgtgataatgagaattgaagtggactgtgtgacacgccaaggaccagagcatgcaggtgtgcagagatgtggacccaacgctgcctgccatgtgggatgtagcctcatgtctcgggctgggaagagaagggaatccaaccaagggaagtcaacattaatagaaaggaaaggtgtcacattttaatggtcctccatggatcaccccagaccagtgtctctgcactcaaacacccattcctccctctagaaattgccagaggctgaggcaggagaatcacttgaacccgagaggcggaggttgcagtgagcccagattgcgccactgcattccagcctggtgacagagcaagactccatctcaaaaaaaaaaaaaaaaaaaaaaaagaaagaaaagaaaagaaagaaaaaaagaaattgccagcagacagtccagatggcataggcctcagatggtcttcccgaacctcctaggaccatcagattcgcttccaaggctccagcattcaatggtgcattgttctctcttctgttcaccttccagctgcagcttgggggcttctctggctgtgccaatcctgaaatatcagaatcccaaggaccaccaggatcaagccggccatgcccatgcggatgagattctctactgcgtaatcctgaaggtgtgaggctggggatggtggacaaagaggtcacagaggtcagggcagatcagtatcacccaggacccctggatgtctccccagggcacccatatcatcttgacaggacctgaccctctgtgccagttccataactgagagcatctcctcactcaccagtcccagagtcagacttgttttgtgacggactgaggttatcagctgctcctgaaaatcaaaacaggggaaggggaaggagaagttcttgaagcaatctgagcccagcctctcccctgagctctgcattctcctagttccctgtgcctctcaacatgacttttatggagttcctccataaaccctccctctgctggagcagggttccctccagtctcctcactgaattatttcagctttcctttgttctttgaatttaaactttgctcctgagtcatttgggaaagagctttcctgcaccgtgaaagctcaggatctgcaaggaaagtggcccccagaagtcactgagccctttgtgctctctgtgcagcctgggacacaggagcacataagccaattcccccagagatgagagtttcacggatccaccagctgaggacccaggctccatggatgacgggttggtcctcaggggctcctgaaagtcagaatcacaaacagctgcctccccttgacgccacctcaaccacctcacctggtgtttcatcatacaataagtctctagtcagctaactattcatatagtcagtcatatatatatacgtatgtatataaatgtgtgtgtgtgtgtgtgtgtgtatatatatgtatatataaatatatatatatatatatatatatatatatatatatatatatatatatatatatggtgttacagaggctcataaaacaatttctgcttttagggccaggcgtggtggctcatgcctgtaatcccagcactttgggaggccaaggcgggcagatcacgaggttaggagttcgagaccagcctggccaacatggtgaaaccccgtctctactaaaaataaaaaaatgagccgggcatggtggcacctgcctgtaatcccagctacttgggaggctgagacaggagaatcacttgaacctgggaggcagaggttgcagtgagcccaggtcatgccattgcactccagcttgggcaacagggcaagagactccatctcaaacaaacaaacaaaaatttctgcttttataaagtgtgagtctaggtgagaagaccaataacaaacatgtaaaagccctccatgtcaaatacattaagcatgtagatatacgtataaaaaatatatgcagatatacctacacttatattcagatgtaacttatataaccatacataaatatgtatatatgtaaaactttagatatttatttaagatgcagttacatgcatattaatacttgaagtgacaaaaattgatatgcggtttagaaataaaaaataaaatttcaattttcttatagttaatataaattttatcagtaaatttggggagatcagttgaaagataattgaaagggaaaaatgttatagcaagctaaaatgaaattaaatgaatatactcaaactaaaagct[185 bp omitted]ggtggtgggtgcctgtagtcccagctactcgggaggctgaggcaggacaatggcgtgaacccaggaggcggagcttgcagtgagccgagatcgcgccactgcactccaggctgggcgacagagcaagactccatctcaaaaacaaaaacaaacaaacaaacaaaagaaatatacatgaatcaaatacttcacttaagaataaagtagttgaagaattttttaaattagactaaatgtacacattcttatgaacggaacttgaaaacacttattaacttcattaataaacttcaattttatatattaataatagaaatacttgctattaacaactaattttatacagcaaatgtaaatattgaattatgcccccaggacaatgggagtggaattacttgtttttaaatcataaatccatatatcttaaagagacaaatttaaatattcaaatattgttttaaaagattcagaagaagagagaaaaaataaacaagtatgcccagaaaatgcagagcagcaatgaacagcagacaagacgtgctgtgaataagttcctaacttcctccagggagcaggtgcgcggcccctcctttgtctcaggggtgccctgagcacagaggcctccaggtgagcacaggaggggcggtgtgagtggtacccacagctggggcgcttctctctaaaggagcaggtctggcgtggactccagcctcatcaccgtcagatcccaccgaggcctgagcagcctcctcccctgtcctgagtgggctcagggaccccgcaggtgtgggtgaggggctccatcctcaggggctcttggaaatgagaagtgagagctgccaagggagcgtccgtctgtcctctctccaactcgcctgcctctcttcctcctccatcagccccagcatcttccccatgttccaagtcaggcctggaccccaaatcctgctgaccaggtctgttctccttcctctactcatcactcatcccgcaggatagggtaggggcctgggagtcttgtaaagctgcatggtttttagtagaaaatctgaaacgcttcgtgtgacatgtgagagagaggagattctaaacagtggggtttttacacatctttgctttctcataatattgtggcttcgtctcacgaacctcagaccccagcactgatggatatgattacatgtacctgcagctgcccctcttggctttctaacccttgcgaggcatagctattggcaagagcagaccaggtcttagggtgagtgatgggagctgcttttctaggtctaggatgagccacatctcagatgccccacaaggtcagaaatgagggggctttgggggtcacttccaagctcagggggaagtcagcctgggagagcccagcctggggctgccggccagtggaggaggtcacgtctgtcctccttgtagagagcaaacctgtcatagccaacatcagagtgatactggagggtcaggttctctccagggaccacaacagggccctgcggggtcaggagggagggctttctagacacacctggaaggataaaggagccgggactgcaggggctggtt[136 bp omitted]tcccgggttcgagcgattctcctgcctcagcctcccaagtagctgggattacaggtgtgtgccgccacgcccagctaatttttgtatttttagtagaaatggggtttcaccatgttggccaggctggtcttgaactcctgacatcaggtgatccacctgcctcggcctcccaaagtgctgagattacacgtgtgagccactgtgcccagcccttgctttgttttcctcaccctgaatttgtgtccctaggatttctgtgttctccttcccctttttgtctttcttagcaggggctgccctgcctgtaaagctctccacaacctgtctggcttccctgaattgtactagagaagactgtggcttcctcacctgagaccggaatctccaggaggtcactgggttctgaccatacctgcaggatatgcctgcgagagccatagcatctgagcatccacctgtggctgggggtcacagggcccacagggaacagggcctggaactgcccactgggggtcagctgtgagtccaaggtccaggagagcttgtggtctccttcctcagtcagaatgaacctgtcgaatctcagccgtgagccacactggagggtcacgttctctcctgaggtcaccacaggactgggcagggctgagagggtgggtttgttgtagaatcctaggagagaaggaggcaccgtgttaaatggggctcccacctcccacatcatccccagggctgggctgtgaaagggagacacccctgagagccgacccccttcctgagggcagagcctggagctgggaccccagagtgtcctctcacctgtcaccaccagctccagggggtcgctgggctctgaccagcctgcagggctgtagtagtaacagcggtatctccctgcatggtgctctgtcatggatgggatggagaatctggccttgttcttgggctccagtgggttctgtgtgtcccagggttctgggcttccctctttaaccagacggtattcctgggcctccagggtcccctgacaccggatggtcacagagttcccccggctgatcacagagcctggctcagcccagagggtggctttggagaggttccctggaaggaaatcagagtctgggctccaagacctccccacccctcagatcccagctctcagccccaggaccctccagacgtccccatcaatcacccagaactgcggtcttcacccccagctgcccatgggtggccctttgtccccattgaggaggagggacctgggacagctggggacagactcacctgcctgcacgtgggtcctggggcccagactcagccctggaagagagttccctgtgagagatttgcctctgaagcctgagcaggtcctcccctgcctgggaacctcctaaaaccctggagtttcctgatagacaagggcctcgttatggggtggggtccctcccagactagggtgccccttccctgaggcttccaatctcaccgaggcagagcagaaccatgagggcagggctcacggcgtctcctcccactggctgcagctgtgcagatggatgagaccatggtgcctggcaggacagagagacacacagggtgtggcagctcggaggctgggtccttcttgtcataggattttctcattctcagcccacagaaaggggaactgctctccccaggagcctggctctcatttccccagggctgaagtgaagtagttgagactacaggcaccaggctctctgcagacatttcagacagaagtggggtctcccttccccgggccactgtctgcctgatttatctttatctcactgagagccgggacacagcagcaaatagacccggtgccttcctgagtcagcccctttcaggcgagggtgacctcctccctctcagagcctccccatggggtctccctccctccttcagcccgtccatgagctcagcgttgcggggtccttaccatggtcagtgatttttcagccctggagatgcttcagggaagatgcaggtccatgccacaggcagactcagatcagcagagacacatctgacacctggctgtgtagcccaggctgagctgcatgtggcaatgagcacagaggagaaatgcagggaaataggggaggaaatcatgaccctttagtggccctggagtgttttctttctaaccaatagtactctctttcttgtacttcccttaattttttttttttttttttttttttgcaacagcgtccacctccaccccacctccagtaacaaacctctgaatcttttctgcctccactgtgccttctgtttctttgggcttccctctatacctcaatccatgttcaacattttcggagtaattacttaggctttgttttaaaattttcattcttatgtatctatttattttttaatttttgtgggtacattacttaggtttgggctctggtttgctgagtgggga[132 bp omitted]tctcctgcctcagcctcccgagtagctgggactacaggcgtccgccacc[184 bp omitted]tacggcttgtgtgatcttgggcagtactgtctcatctctgagcctcagtttccctgtgtggagcctgttgtcatgaacctcactcatcacagcggatgtgggggtcagccgtgcttgggtcatgggagaggctcaatcacggttaatgtctagactagattaagacatgaggggttgggacatgagaggattctggtttcagtctctatgattatgtcacagaggtgcagaaaaagcatttgataaaatcctgcatcccttcatgataaaaattcccaacaaacaaggtacagagggacatacctcaaaatactaaaggcgataggtgacgaaatcccagccaatatcgcaaacagggaaaaatagaaagcattccccctaagaactggagcatgacaaagatgtgcactgtcaccactcttcaacgtagtactggaggtccttgccagagcaatcaggcaagacaaagaaataaaacacatctaaattggaaaaaaaaaaagtgaaattatttctgttcgctgatgatattatcttatacctcaaaaaccctaaagactcagccaaaacactcttagatttgataaagaaatgcagtaaagtttcaggatatagaatcaaagtacagaaatcagtagcatttctgtactccaataatgacgaagctgagaaccaagtcaaggaggcaatcccatggacagtgggtgcacaaaaataaaacacctgggaatatatttaaccaaggaggtgaaagatttctacaaggaaaacttcaaaccagtgatgaaagaaattgtagaagacacaaacagatggaaaaacatcccattctcataaatcagaataattactatgattaaaatgaccacattgcccaaagcaatctacagatttaatgcagtccttacaaaaataccttcatttttcacagacttagaaaaagaaaccttaaaagttatattgagccaaaaaaagagcccaaacagccatagcaatcctaagcaaaaagagcaaagctagagacatcacattaactgactcaaagtttacaaggctatagtaaccaaaagagcatgacactggtataaaaatagacatataggccagttgcagtggctcacgcctctaatcccagcactttgggaggctgaggcaggtggattacgaggtcaggagttcaagaccagcttggccaacatggtgaaaccccgtctctgctaaaaatacaaaagaattagccaggtgtggtgatgggtgatctcaaattaacaacctaacatcacaactaaaagaactagagaataatccgcccggcgcggtggctcacgcctgtaattccagcactttgggaggctgaggcgggtggatcacaaggtcaggagatcgag[135 bp omitted]gcttgcagtgagccgagatcacgccactgcactccagcctgggagacagcaattggaatgcaatttagaaataaagtgaaatttcaacttttgtgtgagttatgtacattttattagtaaattagaggggatcaattgaaaataattggaattaagaaattctgtagtaagttggtataaaataaagtaaatgaactcaaaccaattactgtatcatgtatacctagcttttatttataaggaatcaaagacctcatttacagattattcaagtgattgaataattgtttaaattgaaataaatatataaaattcttataaataaaatttcaagacacttcttaagttcatcaataaacctcaattttaaaagtttaggataggaaaacttaacataaataagaaactattttctaaagcaaatatataaatgaaatcatgtcccaaattaaaatgataagtttatatattcatgtattgctttaaatgtttcagaagaacagagagtaacaatagacaagtgtgcacagaaaaggcagggtagaaatgaatgacacacaagccgcgctgtgaataactccctaactcatccagggagcaggtgcgtggcccctccttactctcaggggttccctgagcacagaggccttcaggtgagcacaggaggggcggtgtgaggtgcacccacaagtggggtgcttctctctaaaggagcaggtctggggcggaccccagcctcatcccagtcagatcccaccgaggcccgagcagcctcctgtcctgtcataagaggacccagggaccccgcatgtgtgggtgaggggcttcatcctcaggggctcttggaaatgagaaataagagctcccaagggagcgtccatctgtcctctctccaacttgcttgcctctcttcctcctccatcagccccagcgtcttccccatgtctgagtctggctggaccccaaatcctcctgatccagcctgctctccttcctctgctcatcacatatcctgcaggacagggtaggggcctgggagtcatgcacagctgtgctgggtgttgcttttagtagaaaatctgaaacagtgtgtgatgtgtgagagaggggagattctaaacagtggggtttttacaaatctttgctttctcctaatactgtggcttcatctcacgaatctcagaccccaacattgatggatacaattacaattacatgtacctgcagctgcctctcctggctttctaacccttgcaacacacagttattggtaggagctgaccaggccaagggagggctgggggacggcagcaggtctaggatgagccgcaacccagatgccccagaaggtcagaaatgaaagggctttgggggtcacttccaggcagctccttcttattcggatgggaaaggccagggcggaaggggaaaaggctttctcagaagttctgaggtaggatgtgggactttggaggcggggactcagacaccacaccagattgagaactagctaaaacagggcagagggtggaagcagctcttcttaagacacgcccaccagtgtggcatcccggtttaccgttgccatggcaacccccggaaggtaccgcccttttccacggcaaagacccactgaccggaagttaccgccctttttctaggaatttctgcatacctgacctttaatttgcatataattaaaagcaggtacaagagtggctgcaggtgtgtttctgagctgctattctgggcacaccgcctgtggggcagccctgccaccctaggagcagtacctctgctgctgctgtgctcggccacttgactagaggttgccgtaacccttaaggggttgtgtaacaccagctcacccttaaattccttttttttttgtttttgagatagagttttactctgtcacccaggttgaagtgcaatggcgccatctcggctcgctgcaatctctgcctccggagttcaagcgattctcctgcctcggttccgaagtagctggaattacaggcaccagccaccacaccctgctaatttttgtagtctttagtagagacggggtttcaccgtgttggccaggttggtctcagactcctgacctcaaatgatctgcccgcctcagccttccaaggtgctgggatgacaggtgtggaccaccgcgaccggcctaaattctttcttaggcaaagccaagaactcttctgggctatgccccgatttgggagctccccttccccgcatcatctagttaccaggaagggatgacggagacagcgagtgagaggcagagagactttccgcagaggcagggacaattaggagagaggcgagatggctagacagcagagatggtgacagtgatcagcggaggggtggcaatgggtgaaagacacggagaggtggcactgggctagacagcgagaggttgctgagacagtcggagagacagcggggcggggcagtctgtgatcagggctccaagagcggtcacacaggctgtaacagtaaacagctgctaatactgcagagctgtcacactaaccaaaggctttgcttttggcgccttcatctttccttggatagtggtggagctcagcgatgggcaagcaggtgagacccccgctccaaccgacaggcccatgggttaccagtccccgcaccggacccctgggtgacagctgagcccacccaagctgggggatcctgcagagaccttcacctgggccccatgtggaagatttttgatgttatttaggcttttggggatgggggagtgtcccctctgcctcccccgtaatatctggtgagccgtatgggtaatgcgagcactagacacctaaaccccaccagaacgcaatgcatccatgtaaggaacctgcgcgtgtagcgcctgaatctaaaaaaatagagtaacattaaaaacaacaacaacaataaagccgtgtgaggtggctcacgcctgtaatctcagaactttgggaggccgaagcgggtggatcacctgaggtcaggagtttgagaccagcctggccaacatggtgaaacaccgtctctactgaaaatacaaaaacttagctgggcatggtggtgggtgcctgtaatcccagctactcatgaattatcatgaagagaaaatgggccaggtgcggtgactcacgcctgtaatcctagcactttgtgaggccaaggcggacagatcacctgcggtcaggagttcgagacaagcctggccaacatggtgaaaccccatctctattaaaaattaaaaattagccgggcatgatggtgggcacctgtaatcccagctactggggagtctgaggcaggagaatcacttgaacccaggaggtgaaggttgcagtgagccgagatggtgccactgcattccagcctaggcgacagagagaagcttcgtctcaaaaaaaaaaaaaagagaaaaaatggtccacaataaaataacaggcggttattgtacctgaatttatcagtaaaaaattgaattttttcttttattgcctagagtccaccttctatcaatgtcacaagcatgacactcagaacagagaggaaaagattatatttgaagtcctaatataaatttaatttaccatattgaagtataagtattttagagttgcttcatgaattttttgctaaaatctaaaaagaaaacccacaaaaaaccctaaatgtaatgacgttaatgcagttcctgacagtgacttttagcccttctgcaaacttttgtttcgttgccttcctgaccgtatgacgcaatgaaatttcgatttgctttaatttctgcttcctctttccctatgtttcagttctgaaggtatgagcttctctcatctttttcttttcttttactttgagatggagtctcgctctgtcacccaggctggagtgcaacagcctgacctcagctcactgcaacctctgctacccatgttcaagtgattctcctgtctcagtctcccaagtagctggatgacaggcatgagccaccacgcccagttaatttttgtatttttagtagagacaggatttcaccctgttggtcaggctggtctcgaattcctcacctcaggtgatccacctgctttggcctcccaaagtgctgggattacaggtgtgagccaccgtgcccggccaggatatttttttctttagagcacttacttcactttctttgagtgaagttggatgggttacagccgttgtggtgttacaaagaataattctgagagaaatattgttatttgttggtaaaataaaagtgtcttaagttaaaagtttcctttgagacccaataaagaaattagtattactacataatgcatttatttacaagtctttttttgcatgtccattgtaaatttaatattttaatttacaatgagtttacaaataatttttacaaataaatgttacaaataaaaataatttacaatgagtaaatgagttggaatttatttacatgcttatggctgcctttgattaaacttcttccaaaaataaactctgtccagatgttgggttttattatacttaatttcattttaatgttatttcatgtgagattacttgaatacaagctgttgcataattgctcccaagtggagtctttgctgtgcacttgcataccccagagtgggaggtttggggattctgaatggccagggcagcgtgtgggtgtaccttcacaggcctgatgtgtgagccttcaaacaccggggtggaggaagtgattaaatagaggatgcaatggtctggaggcaatttatagcccagagaccatacctggggcatttctcttccttatctagcacacaaagtagaaccgtgacactcgggcgtcactgacaatgaacacaaaggggctgaatgtcgggaatcctgcagacgccaggaaagaggtacttctcagccattggcttggattctgaatctgggttacgcacaatgacaaaatatcagctagagcatgagaggagacaaacatgctcaccaggatgaggatggtgtgtgtggttgtggtttcatgagatgttctgcgggagaggttgcggctgcgaacatgttggactctctgcttgtatctatgcaggacgaggaccatggagctgctggtgcagatcatgagggagacacatatacgggagacacatataccatctgtgcagcagtaaatgactgcaactattacatacagcgatcttcctggatagggtgaggagcagtatctatacattttttccatactcatgtttttgctctttattgggtcagttatttactttgcagtataaatatttacaacaagattcaagatccaacagaggaaacagcagaaaactataaactttggggatctaattcagagttccatcttcccagagatactggggtgaagcttcatggcctggaagccactgaagaggcaggtggtgctgagggaaacccctctggccactctgtgtaggtagaagacaagtttacatccagcctcatccaggaaaggtttcaatccaaaagccgccactgtctgagggatccctttagagaaaagaaccgggttgttggctaagaccagctggctgagaatcaggtctctgggtctcactatttgtgtggggacaaaagtaaagctataaaagtaaaggagtagagaatttccaaggattccagcagcggtctgaatgagaaaggtaatactccaatttaagttaacagaaaccatctccatttagaggagatgttggagtttgattctattttcatcagaggaatctgtagactgaaaaatacaattgagtgttttcactgtacccggtttcatgcgcttccgtgtgaagagaccactaaacaggctttgtgtgagcagtaaagcttttaatcacctgggtgcaggtgggctgagtccaaaaagagagtcatcgaagggagataggggtggggccattttataggatttgggtaggtaaaggaaaaagaggggttgttctctggtgggcaggtgtgggggtcacaaggtgctccgtagaggagcttttgagccaggatgagccaggagaaggaatttcacaagataatgtcatcagttaaggcaggaacaagccattttcacttcttttgtggtggaatgtcatcagttaaggcaggaaccagccatctggatgtgtatgtgcaggtcacaggggatatgatggcttagcttgggctcagaggcctgacacccagaaaatgcctttttctcacgaaactcattattccaggtgaatacaaacattaagaacaaacttgtacaattacaaagctatttattccaaaattatgatttgtaaaactacaatgacttgaacccacttaatttcaatcaaagaaagactcaataaattcctgggcctccccacagtggagtcctgggcagctgtgggtgagatgaatgagttatcttgaaggctgaccttccaagacgtgtagttgtgtagttggggtggcagggagaaaagaaaaagaaagattcaggacgttatcaacagttaactttattttactcagaaccagagaaaaatggtatagtgttatgtcattgtgtgtgtattttgtaatctattttttaaaatgaaagattaatcaatacctttaaaagtgggtagttgagagagagagagaaaacagtgcagaggagacagaataaagctagactgacatcattgtgtcttgtttcttgttttggtatagaaatataaacatacctttgggaggctgaggtgggcgaatcgcaagatcaggagttcaagaccagcctggccaacatggtgaaaccccacctctactgaaaataaaaagattagctgggcatggtggcacactcctgtcatcccagctactcgggaggctctgacaggagaattgcttgaacctgggaggtggagattgcagtgagctgagactgtgccactgcatttgtagggaccagccccacagggtcggtgggtctctccctgtgtgtggtgacgatagagtgtagaaataaagacacaagacaaagagataaaagaaaaggcagctgcgcccgggggaccactaccaccaatgcgcggagaccggtagtggccccgaatgttgggctgcgctgttatttattggatacaaggcagaaggggcagggtaaagagtgtgagtcacctccaatgataggtaaggtcacgtgggtcacgtgtccactggacagggggcccttccctgcctggcagccgaggcagagagggagaggagacagagagaaagacagcttacgccattatttctgcatatcagggactattagtactttcactaatttactactgctatctagaaggcagagccaggtgtacaggatggaacatgaaggcggactaggagcgtgaccaccgaagcacagcatcacagggagacggttaggcctccggataactgcgggcgagcctgactgatgtcaggccctccacaagaggtggaggagcagagtcttctctaaactcccccggggaaagggagactcccttccccagtctgctaagtagcgggtgttgttccttgccacttacgctaccgctagaccacggtccgcttggcaacggacgtcttcccagacgctggcgtcaccgctagaccaaggagccctctggtggccctgtccgggcatgacagagggctcgcactcttgtcttctggtcacttctcactgtgtcccctcagctcctatctctgtatggcctggcttttcctaggttatgattacagagggaggattattataatattgggataaagggtaactgctacaaacaaatgattaatgatattcatatataatcataactaagatctatatctggtataactattcttgttttatattttattatactggaacagctcgtgtcctctgtctcttgcctcggcacctgggtggcttgccacccacagcattctagcctgggcgacgagcaagactccgtttaaaaatatatatatatacatatataaacatattcctgaatgtctatactataaaatatttttaaatataacttataaatctaaagataataccttaaaaaaggaaatagaattgagttcctatcaaattagggcattactaaacaaggaagaattatttgtactagaatgtaagcaaaattacttgaccatatattttataatgcatatattatttatcatattatataataaatgtatacttttaaatcaaattatatattatgtagtgacatatagttaatattattatataattttgactatatatagtaaaacataagtgaatacaccctcaaaaatgtttaattcttaaaatatgtatggtcaaaaattctaaatttcatcctagagaaatagctgactccacattcggagagaaaatacaggagatgaagtcagaacttcttatcatgcaagaaagcaaagacatcaccacataccatcagattcatgttacctgaacataaagtctatcatgaaaagttcccaatggcaaaatgtggaatatttatagaatcaaataatataggtagtgtattaaaactaatgaatatgttcaaagcctatcagtttactactgttaaaaacaaaattaaaaaacaaaaaacccctcaaatatgaggaatgggaaaagaacaaaatctccacatcaaaaacgtggaaatgaaggcaagaagcaagatctcttttgtttatctgaagtgttacacaggaaacattcttttctgtagaatgtttctacataataataagtatagtaatagctatagtaatgtttttgcctaagaatagctgtagagtttttgcataataatagttaaccctgcaaagcttggataacctgtgcgttgagtatacaagcaataaacatcaatggctgccaaaacccttaggctgaaggttgatagtgaatataataacgagtggatcctgctgatagtacagccatcagtacagaattgcaaggtggagaatgcaagacacaagcaaatgagccattgtgtctcacttctgacattttctaagcatctttttcaccataccctcaaatctagaccgttatctggctgggcgtctctatgtttcttggatttgtgtgtcaaactctctagcgagtttaggaaaatattcatggactatatcctcaaatatattttccaagttgcttattctctcttcccctttcaggaatgctgacaagtcatacatttggtgtctttagataatatcatatttctcagagattttgttcacttttaaaaatattttttccttatatttgactgatttgattcaaacaagtcttcaagctttgaaattcttttcctcagcttggtctattctgctgttaatgcttctcatcgtattatgaaattcgtgtcatgaatttttcagctcgagaagttcagtttgggtgtttcttaaaatttaatcgttcatgtcattaatcattttactggattgcttggcttccttggattgaatttcaactttgctcttgatttgaatgaccttccttgccatccagattccaaattctacgtttgtcatttcagacaattcatactgattaagaacaatttctggggagctcgtggactggtttggagataataggagttatttccctgattttttttctcatctgggagggttgctattcctttcattgcaagggtataaattgagtatagtctgttggctttatttctggaagttttcaggggactaaggctctgtacagggtctttgctgaattcttgctcttggttttccaggcggtagaatttagtaaagtgatttttggtgttgtagtgtggctgtaatccagtagatggcgcttgagagcaataggcaatagacaggctcttactccactgcgtggtgcctttgtttatctttgttcttgaccttgatacttttgaaaaggtcagagcagtttttttgtttttgttttttgagacagggtctcactttgtcacccagggtggagtgcagtggcacgatcttggatcactgcagcctcaaccttcccaggctcaggtaggtgacagagcaggcaagttaacttaaggcctcctccttggcaatctggtctcaagtaggggacaggtccccacagacagaactgaggggcaagtgtggcatgggctccagaccccgagcactggaattagacacctctcctttgcagaaaggtttagcctttcctcaagcggttctgcaaaggagaggtgtagctggggtggcgtgggcaatggtggtggcagagtttgtgtgaaacttgtctcttccccaatcactgtcacttgtttcaggagacgttgtaatgtgctgtatggtttgacctccaggccagtaggtggcaattgctggtgagagccagttgtagcgctggcagtgggctttatgcttgacctttgttaaccagaagcattcaggtatcctaagtgatgggttgggttgtggaaaactcagtggtcttgatcagtactctgcctccaacgcagggaaatgaaggtaagtgtggctggtccaggcaagcctgtactcaggcccaatgctaggcacaggctccgtccccacagaggctacatgtgtggttctcaggtccctggagagacactcaagcactgagtagggcaatgactattatgccaaagttacagcagagttccccagaggggcacgttgggttccaagcctagaaaatgacagtgggactcactttaatctaatgctcccaacccagcagagctcctccctgtggcccaatgctggaagcaatttcagaccgtcaaatcacatgcggtttgatgtcagaccactcaactaccccaggccacagatcttgcctcctgggtaaaatccatgcctctcaggctacaacttttccccctcggttctgtcaaagagaggtgtccaacgccagtgcttggtgtctggagcccatgccacaattgcctctcagttctgtccatggggacctgtcttctacttgagcccagattgtcaatctctggcccaagactctccgaagtag[138 bp omitted]gcctc[358 bp omitted]aatggcctctttctatcagcatccaggtctgggagcacacatggagcacttccctgggcccttccttttcacagtcctcccgctgttccctaagtcagatccagggcttaggtcggtcaaagagctccccagtggcctggattgcctggctccccactgagaatgggtatcatgtggtctcataacttccctctcaggcactggaagttcactcatggttttctgccaggtcttgctgcatgagctgctgcctgccttctttttagcagtatctgagatttccttcactttcatattcaactcctgtattagtccattttcaggctgctgataaagacatacccgagaccaggtaatttataagaaaaagagatttaattgactcacagttccacatggctgcagaggcctcacaatcatggtggaaggtgaaagcaacatctcacgtggtggcaggtacagaggaaatgagagccaagcaaaaggggaaaccccttataaaatcatcagctcttctgagacttattcacgaccacaagaacagaatgggagaaactgcctccatgattcagttatctcccaccggctcccacagcacgtgggaattatgggagctacaattcaagatgagatttgggtggggacacagccaaaccatatcacctcccatgttctttcttggatacaagaatgcagaatgaatctctacacaccattttggtattttcaccatctcggaagacataacagtgtattatatccttaaaaatcactataaaagtagattttaagggttcttaccacacaaaaattagaaatatggaaagtaatgtatatgttaattagattgatttgcccaacagacaagtatatatatttcaaaactacatactttacacaataagtatatacaatttaggaatttttcttttttctttttttttttgatggagtctcactctgtcaccaagctggagtgcactggtgcgatctcggctcactgcaatctccgcctcctgggttcaagcgattcccctgcctcagcctcccgagtagctgggactacaggcgtgcaccaccacgcccggctaattttttgtattttagtagagatggggtttcaccatgttggccaggatggtctcgatctcctgaccttgtgatccaaagctgtgttatgaacatgaagttctaaacacattttctcatatgttcacacatgtctcattccagcctcagtgctcatggggtaggatctccttacctgagaccacaaaccctgggggtccctggggtgtgaaaacaggtagggggaggtactctataagacatagcacctgtaggtcctcccagcattcatggagaattcagcctgtactgctgagcttggtactttgatattagacacaaaggtagggatctgctgctcccttcttggaaataagaaaagtgtcactgatgtagcaggaccatgttctttcctgaggccaccatggagcccggctgcaccaacagggaatatccctcaggcagctgtcctagagagaggcaggatgggtgaggggctgcccccaccttgttctgagcagagaccttcccagggcttctctctaggaccctcagtctctctgtcattcactgtttcctctgagtctcttcctctccctcccatccaccttgcccctctgtctctttccctctctaaagaaccttatccattgacatggtttgattgtgtccccacccaaatctcatcttgaattgtagctcccataattcccacgtgttgtgggaggaacctggtgggagataattgaatcgtggaggcggtgggtggtttcccccatactgttctcctggtagtaagtctcacgagatctgatggttttataaggggaaacccctttcacttggctctcatttctttcttgtctgccaccatgtgcctttcaccttccaccatgcttatgaggtctccccagccacatggaactgtgagtccattaaacctctttttctttataaatcacccagtcttggggatgtctttatcagcagcaagaaaacagactaatacactcatcatgctggtcatcaccgcctgcagatccccagcaggccctgtgcagaatctgggtccctgagtgaacctgctggacccctcacctgcaatagcatatccagggg[137 bp omitted]caaaacccagtctctactaaaaatacaaaaaaaaaaaaaaaaatttagccaggcatggtagtgtatgcctgtaatcccaggtacttgagaggctgaggcaggagaattacttgaacccaggaggtgaaggttgcagtgagctgagatcgtaccacgcactccagcctgggcaacaagagcgaaactccatctcaaaaaaacaaaaacaaaacaaaacaagaaaagaaaagaaaagacgttgcgtttagcacagcatctgtcctggctcccatgggagccactccaaggaaacgtcagcctgacggagcccagcctggggctgccagccatggtgccagggtggtcatgtcgcctctcctcagacaggaaaagtccttggtggccaacatcagagcaacactggaaggtcagactctctccagagattaggaggggcccctgtttggtcccgtgcagggagtcctagacacacctagagggaaagacaagtcaggactttgggggctgactcccctcaaatacatcccttgtcctcctggctctgcagatctcaccatcacttatactctgtgtctctggccccagaagccctcgttcccctcattccaccctcacgcttgggacttgcctgggagcaagatccacagcaacctgtctgatgcttcaaagaatgtttggggtaaagatgggacttcctcacctgagaacaggagcttcagggagttgctgaggtccgaccacacctgaagggtgttctgacttcctcacctgagaacaggagcttcagggagtcgctgagttccgaccacacctgaagggtgttcctgttattgccatgacatctgaacatccatctgtggctgagggtcttggggcccacaggaaacagagcttgggactgtccactagggtgttgctgagagtctagggtgcaggagagactgagttctccttcctcggtcagaatgaatctgtccagttgcagccatgagccacgctggagagtcctctcctaaagttgcaacaggctcaggggggctgagaaggtagattttctgtagaatcctaggagagaaggaggtagtgtgatccttgaggctcaagcctcccaccttatcccttagggctgggctgtgagggagagacacccctgagagcagacccctttcctgagggcagagcctggggctgggaccccaaggtgtcctcccacctatcaccaccagctccagggagtcagtgagctctggggctgaaatagtgacagtaatatcatcctacatattcatttgtcatggatatgatgggggaactcggccttgtctccaggctgcagtgggctctgtctgtcccaggacactgagcttccctcttttttttttttttttctttttttttttgagacggagtcttgctctgtcacccaggctgcagtgcagcggcgtgatctgggctcactgcaagctccgcctcctgggttcacgccattctcctgccacagcctcccgagtagctgggactacaggcgcccaccac[131 bp omitted]caccacgcccagccccctcttttttttttagttggagtcttgctctgtcaccaggctggagtgtagtggcacagtctcagctcactgcaagctccgcctcccgggttcaagtgattctcccacctc[134 bp omitted]gcctctcaaagtgctgggattacaggcatgagccaccgcgaccggccctgggcttccctctttatccaatcggtactcctgggcctccaggttcccctgacaccagagggtcacaggcctctcccaggtgatcacagagcctgtctcagcccatggggagggtttggggaagggccctgaaatggaaccagaggctgggtcccaagatctctttcactcctggttctctagtttagtccaaaacccctctctgttttatcaccctcagcccagaacaactgtgccccccaacctgagagcccaggggctggagtaagagggaggctcgtggagaacctggtagccccttctccctccatcactgactgaggcagagaagcacgaacaccgtgatgcctgctctgggggctccagctgtgggagaggagaccacagggccctccaggacagacagacacacggatgtggtcactcagagcctgctgctgcccgtccaggtacccacagctgtggacccacaggaagggaaactgcttttccctgggcctggctctggttttccctgggtgggggagctcaggaggaccccagactctctggacacatgagcctctgctcccctcccctgccccaggtcaccgtctctgctgcaggtgggacaggacaggcccctgtggaatcgggtctgggagtttccctgggaggcctcctctcccaggaggtcacagctgggagtcagagctgaaaggaactttcccacccgcaggcctctctcctttacacttggagaaactgaggcccaggcagaggaggggcctgtccacatcaccacctccagaggagcctcaaaccgatgacagaacccacccctgcctcccctggaccccgcccacctcccactcaaagcccctcacttagcactgtgggggcctgacgttgtgggggtgaggggctggtccttagggcctgctgggtcaggatggggaggtgagggctggggctgccctgctccccacgtcagcccggctgctcctcccccaggctgggccccaacatctccctctgcctcgacccccgcccctcaccagcccagcctcagagccccggggagcctgtggcccctcctctggctctgcctcagctccctggagggaagctcgtgcttgagtccttgaggggaatgggatcatctgggagactcaggactgccctgggggaggccaccctccctctgagcccagaggcctcaatgactcaccaggtatggagaaggagcctatgggtggagggctggggcccctggagggtcctgggaaggagcacagaaagggagtgaggaattggagctatcctggagtccccacctccactcaaagctctcctctccatctgcccagtggcctctccaagaccctccctcttcccacctagcaccttctggactccaggtgaaggagaagagggagaactcctgttggcttcttctcctctgaggggtgaattcctctgtggctgagtctccctcagagcccccttcactccatctctgcccagagctctcctgggggcagggcctgagctgagtctttgaacttagagaggacagggtcagggcctttcacccaagaccaccagctccgactgcggtgtgatagcaggtagggggaggtgcagtcatgtgagaatcttgaaggtgcccatgaagggagtgtttataccacagtcatcaacaaattccacaaataaatgctttttagaaaacttttttgttgttgttcaggaagccagtctatgcgcacaacagcaggcttttccatcaaacacttctcttttgattcctagtgactgtatctctggagaaactacagatgaagagtgacaggtggtacagcatcactttgaacttaaattttccaaacacgaatctgatttttgcccatggatttaattatcaaaagcaaattccatgttatgagctgaagagatagtcccagtaatacacattagaaaatgcagtagttagaaataaagaaaggtgtattacctgaaagtggagcagagcatgaggtcacagaggggcggacccaaacccaccataggggtgaagccttacatcatagggaagaaaaacgaaggaaggggcagtcaaggagagtcgacaatgaggaggaaagcaccacagtttaatggaggaagcatcttctacagacacccagacatcttcctgcacctgacccatgcttcttccccttgatattctcagcagacacttccccaactgctgccccagtcttccagaacctcctcagatcatcagatctgttcccaaggctccaccactctgaagggtgcattgtcctttctgctgtttgcctcctggctgcaccttggggggcttctctggctgtgctgagcctcaaataacagaatcccgaggaacagcaggaccaagccagccacacccatgcggatgagattctccactgtgtaatcctggaggtgtggggctagggatggtggacaaagaggtcacagaggtcagggcagatcacaattaccaaagacccctggatgtccacccagggtacccacctccccttgacaggacctgaccctctgtgcccagccccataactgggagaatctcctcactcaccagtcttggaatctgacttcttttgtgctggattgagggtctcagttgctcctaagaatcaaagaataaggatgttggtgagaagctgaagagcctctcccctgggcaatgcattcttatattcctccacctctcatggtgtgactttatgtagatccttagtgaacacattctctgctctcacaggcctcccctggtacgtcattgggtttttcaacctctctgtgctctgggaattcagatcttgtgcctgagtcactttgaaacaaagtttacttgagcccaggagctcaggattagtaagaagaatgatcccccaactagaaagaattgagctcttgtgtgctgtcttggatgtgcaatcttgtgcaacaagaacacaacaactaattcccccagagacagaaatttccatttttcagtggatgaggacccagtctctgtggatgaggagttggtcctcagtcactcttggaagtcaggagcacaagcaagggctggaggctgcaacggcccccactgtgtgcgcctcagacagctcccctgtggtttcatcatccatttaatgtcttgttaactaattcttcatatagttaggaaacctacaatgtgatatgcttaaatatgaaaatgtattcttttctaaatgataatgactaagtgggacagaaaaacatcatttctgcttttttgaagtatgaacctagattggaaggtgaaaagcaaatatttaaaa[131 bp omitted]cggtgaaaccccatctctactaaaaatacaaaaaaaaaaaaaaattagcctggcatggtggtgggctcctgtagtcccagctacttgagaggatgaggcaggagaatggcgtgaaccccagaggcggagcttgcagtgagccgagatcgcaccactgcactccagcctgggcgacagagtgagactccgtctcaaaaaaaataaaataaaataaaataataataaaaaataaaaacaaataaatatttaaaaatctgatgaaaaatattaagcacaggattgaatacttgaatatatgtttgtgtctatatatgtacatagcacatatattcatataaaatatatgtgattaacatggtttataaaatatatgtgattaacatgctttgcatttgtgtctctctcaaatctcatgttgaattgtaatccccaatgttggaggagaggcccagtgggaggtgattggcttccccctggctgctctcatgatagtgagttgtcacgagatcttgttatttaaaagtgggtagcacctcccccttctctgtcttcctcctattccagccatagaagaagttcctgctttccctccgccttctgccatgattgtaagtttcccgaggcctccccagccaggcttcctgtatggcctgtggaaccgtgagttaattaaacctctttcctttataaattacccagtctcaggtaggtttttgtttgtttgtttgtttgtttttgagacggagtcttgctctgtcccccaggctggagtgcagtggtgcgatctcagctcactgcagcctctgcctctgggttccagcgattctcctgcctcagcctccaaggcagttgggattcaggtacccgccaccatgcccagctaatttttgtatttttagtagagatagggtttcg[140 bp omitted]acaatgattatagatacatatgtatacgtggctttagatatttgtttttaaagtatatatgtaactacgtatatattcatatttgagatgagaaagatgggcttacaatttggaaatataaacgtgaaatttccaattttttatggctgatataaacatcagccccagcatcttccccttgtccatgtcaggcctggacccccggaccccaaatcccgctcaggtaggggaggacagacctgactcctccacctatcattgctgctcccttcttcctgcctggttctaggacacctccctcccctctgaccaccacagagggaacacctgctccatcctcagagccccaggaagccacgtggaccacgcccttattgtccactctcccctctgttcctctgaggaacagacccctttcctgaatattggagataaggttgagatgagtctagaatattatactgggtcagagtaactgcgctttcatctcccacggggtcaggacttagaggctggggacacccagatgttgattctgagatggagacatcaggaagggagcaggtggggcctccgtcttccaccctcagtctaatctcatctcctccaaggctcacccccacctgcttgcagccctctccactctttaccctactgagacttcaggggtgggagcccagggtgggaagtcctcatctatttccacactcccataggctggaccttcccctcggtgggaggttcccatgtatttccacccttccatgggctgggccctcccctgtggaccctcccccttcactgtcctgttttcttagtgtcctgaactctcctgggggcagggcctgagctgagagaggctcagggctcacaaaggccggggctgatggaggaagaagtggggcagcaagtgagacagacagacggacactctcttggaagctctcctttttcatttccaagaacccctttgagctcagagtggacagggtcagcgccctcacctgagaccacgagctccaggggctcactggggtgagacagcaggtaggggttggagctgcgtgagccgtagcacctgtaggtccccgcgtgggctgaggtcacaggactcatggggaattcagcctggtacttatgagctccgtacattgatctcagacgcaacgggggatgggctgccccctccttggtcagaaggaaagtgaacatcgggtcccatgactgacacagcagggtcaccttctctcctgaggtcaccgtggggcccggctgcactgagagggagggtctgtcagagatctgtcctggagaaaagaaggacgggtgaggggctgccccaccttgttctgagctgagacctccccaccagtcctctccctgggaccctcagtctgtccctgttttctctgagtctccccctccccgcccatcccctgtctctgtctgtctctccctcccttaggacccccacccctcatcccggccatcaccacctgggctcccccagcagggcctgtgcagagcctgggtccccctgactgaacccgctgggctcctcacctgcgatcaggatatccagggggtcactgggggccgaccactcggaggagacgttgtgtgcgccgtagcatctgtactggcccccgtaggagcggctcacagggctcagggtgaagttggcctgggagagcccagcctggggctgccggccagggcgctgggggaggccatcggccccctccttgtacagagtgtatctgatgtagccgacatcagagccacactggagggtcagattctctccgggggtcacgacagggccctgcagggtcaggagggagggcttcctagacacgcctggagggaaagatgagttgggactcggagcggctggttcctcctgcgccccttccttctgtagccttcctcactagggtttccagcgtccttgtttttttctcattctgtatttgtgtccccagggcccccatcttcccctcatcttttcttcttgcgtgggctagcccgagggtaaggctcccaacagctcacctggtgccctgactttgtataaggaaaagctacggcttcctcacctgacaccagtagctgcagggggtcactgggttccgaccacacgtatggggtgttgttttcatagccgtagcatctgaatgtacccctgttgctgaaggtcagggggcccatggggaacagggcctggaactttccatggttgtgttggtgtgagttcagggtccaggagagcctgtggtctccttcctcaatcagagtgaacctgcccagtcccagccgtgaggcacaccggagggtcacgttcactcctgaggtcaccacagggcttggcagtgcggacagggtgggtctgctgtaggctttcaagagaaaaaaaggcagccgtgtttaaatggggctcacacctcccaccttatcctacaaggctgggctgtgagaagggagacccctcgagagctgagagccgacccccttcccgagggcagagcctggggctgggacccctgagtgtcctctcacctgtcaccaccagctccagggggtcgctgggctctgaccagcctgcagggctctgatagtaacagtgatatcgccctgcatgttcccacatcatggatgggatggagagtttgaccttgttttcagactccagtgtttttaatatgtgcctcgacattgagtttccctctttatccagacggtacccctgggcctccagggtgccctgacaccagatggtcacggggttatgccaggtgatcacgggacctggctcggcccacaggatgggtttgagtaggttttctggaaggaaattacaggttaggtcccaagatgtcctcaaccctcagatcccagctctcagccccaggacccccctcatccccatcagtcagcccagaactgctgtcttcacccccagctgcccaggggtggtcccttgtccccagagaggaggagggacctaggacagctggggacagactcacctgcctgcacccgggtcctggggcccaggctcagccctggaagagagttccctgtgagagatttgcctccgaagcctgagcaggtcttcttcttttccttgagcccctgggatgccctaattgactaaggcatggctatggattggggtctctctcctagactagggtctctcctccccctcttaagatctcaccaaagaagagcaggcttgtgagaatgagggtcatggcatctcctcctcctggccctggctgtgcaggcaggtgtggccacggtgcccgtagacacagacagacacatggtgtgcgggcacacggaggctgggtcctccccatcacgaggttgtcccatcagcacaccgacagaaagaggaactgcccctccccaggaccctggctctcatttcccagggcttgtcctgggggtgagcaccaggctctctgccgatatttcagacacaaatggggattcacaagggggtcgttaagaaggacattttcggccgggcgctgtggctcacagctgtcatcccagcactttgggaggccaaggtgggtggatcacttgaggtcaggagttcgagaccagcctggccaacatggcaaaaccccgtgtctactaaaaatacaaaaatgagccggtcgtggtggcacatgcctgttatcccagctactcgggaggctaaggcgggagaatcacttgaactccggaggcagaggctgcagtgagccgagatcacgccattgccttccagcctgggcaacaagaacaaaactctatctcaaaaaaaaaaaaaaaaaaggacgtttccatctctgtgtggcacagaaaaggaagtccagggtcctcacagacagggaggaacctagggctccaggtgaaagtgagacgctgtggctgcccctcttctgtgtttgcacatgggcactgccatctctctgcttccttgtgggagccatgaggggcagaaagaggaactgcccctccccaggagcttggctctcatttccccagggcttgtcctgggcgtgaacaccaggctctctagagatattacagacagaaatgggctctcccctcactttggctgcgtctatctaatctgtcctcatctcaccaagggccaggatgtagcagcaaacagacccggtgccttcttgattcagccccttccaggtgagagggactgatggttcctccttccctctcagagcctccccatggaggaggctccatctcccctgtgtgtgtgtgaaaaacaggctgtctgtggtattgtcacacctggacatctgtcccacacgtgagtgggaggtcacattggactccgccttgccagccacaactttgggcagatgctaagtttggaagagttgatgctcctggacaggagcagctgtaaccacccgctctggacaggcctgatttctgagtcgtctctgggagaaatgttctttgtaagatcatgtgcatgggggtagatggacagcatgcagtgtatttgagaagagatagacaactagaaattatgtaggcagatgtggctgtggtgaaaatagtaggtagaattaacacacttaaaaatcaattctatggccgggcacggtggctcgcacctgtaatcccagcactttgggaggcccaggcgggcagatcacttgaggtcaggagttcaagaccagcctggccaacatggtgaaaccccgtctctatactaaaaataacaaaaattaggctcatttttgaatccccttaaacattaccagcccctaaatgtctgctctatggattcttctttgaattcagtattaacatctttcccgttccctcgttaatagtaagctaaataaaaacttgtgtccattttatccttctagaagagcaatttttttttacctttttgaaaaaaaaaactttaccaaaatatatttaagatcaagaatgctggtcataagctgtgaaaatctatgtcttgtcttaatcattccatcagcataaaaaatgtagcaatgcatgtgaagtgttggttccaggcaaacctgcttaagactcaatgttcaaggttgttattaggtgggggccatataggcataatggtcagtcacagggaaaccagggaaaagctgctgttcatcagcatttttttttttttacaaactcatcaacagtgagctacattgtttgcggaaatggcctagtcaagacacagtagaattcagtgctgcagtcacacaacaccagcttatctcttaggaacatagggaacattccaggagccatgtttaggaactagatgccagctaaggaccaactttacaagcaaactctcccaacgttatcacccttgcagctgtgagattaactcgttcttgcacaccctgtacctgaaaaaaataatagtcctcttgaatgcagcagcaccttgttcacccggaacatgcctccgctcctccagattcttcccgccctatctcagtttttttctgcagattctccaaggttctgcaaactgtaagcagtaaatccacactcaacttgagttttcatgagggaagccgtctggggccttctctggctgtgctgagcctgaacgagcatcccccagaggccaccgggatcaacacagcatggtcattgggatgagattctccatggcagaggctggaggggcgtggtcagtagacagaatggagcatttgctgagggctagactggccacactcacctcggaagccctggatgggtgtttacacatctacactctggaaaggggagtcccagttattcctcactatgggtctatacttggtggaggttggttgagaggatcagggactctgtatgcgtctgttctcactctgctatgaagaactacccaagactgggtaatttataagaaaagacgtttaattgactcacagttccatatgtctggggaggcctcatgaaacttacaatcatggtggaaggcacctcttattgggcggcaggagagagaatgagagtggagcgaagggggaagccccttataaaaccattagatctcatgagaactcactcattatcacgagaacagtacaggggaaaccgcccccatgattcaataatctccacctggtcctgcccttgacatgtggggattattataatccaaggtgggatttgggtggagacacagaaccgaaccatatcagacacctatgaataagaatgaggtggggcatgagtagccagaccaccattgtatcccccgaccagggcgtataacccaccattgtatcccccgaccagggcacgtaacccaccattgtatcctccccacctccagggcatgtaacccaccactgtatccccccaccagggtgtgtaacccaccattttatccccctcagggtgtgtaacccaccattgtatccccctccagggcctgtaacccactatgccctggctccttcacaactctcctcccttctcatgggagaattgtatgagatccttgctgaccccaactcccagcttgggcttagaaccctatggtcccttcctcaaatatgttcaggttcctgggccttgttgaagtcacagacaacttctcagctgcagagatattgcgggtttggttttacaacaactcagggacagaggacaaaaatctccaacctctggaatgcttaactctgctattccctggtctcagattagtcccaaaattagttaaacctaagcctcacgctttgacctctagtaatgcgtcagctgtcagtatggaatccatagatctgcatgtggggctcctggtgtcccagggccaggaatatgaagcagccaaaggctgtgactgccttttcttttctttctttctttctttttttttctgagatggagtctcgctctgttgcccaggctggagtgcagtggtgcaatctcagctcactgcaagctccgcatcccggggtcacgccattctcctgcctc[134 bp omitted]tgcctcccaaagtgctgggattacaggtgtgagccactgtgcctggccttattttttttttggtcagggagtcttgctctgtcgcccaggctggagtgcggtggtgcgatctcagctcactgcaacctccgcctcccgggttcaagcgattctgctgcctcagcctcctgagtagctgggactacaggcatgtgccaccatgcctgactaattttctgtatttttagtacagatgggacttcatgttagccaggatggtctcgatctcctgaccccattatccgcttgcctcggccccccaaagtgctgggattacaggcctgagcccggcccccttttctttttttgtacctcactcagctctctgcattctctggttcaacttaatagtactactaataacccaagtaataatctcactattcttctgtccatttatctgttttgttttacaattaatgagagaatagtcatagattccaagtaactttttcaggaataagaaacactatagtgaacaaaacctcccattgttcattcaatttgtaatagaaatggagaaagtcagatgaattaagcaaaaatacaaaagagatgaactattatttaaaaacaacacacagaggcataaatgcacaaaatttaagccacctagaggtcttgaatgtgtgttgcccttataaaaaaaaaaaaaaacagtgccagcctggccaacatggcgaaaccccatctctactaaaaacacaaaaattagttgggtctggtggtgtgcacctgtaatcccagctactcaggaggctgaggcaggagaatcgcttgaatccaggagggagagattgcagtgagccgagatcttgccactgcactccatgctgggtgacagagggagactctgttaaaaaacaaaacaaaaacaaacaaacaaaaaaaagcagtgagtactaggggcaaagatcacttaacccagtttgtcattaaaaaaaatgtttttgaggatgtgacaggttaggtaaagactgaacaatgagcaagaggaggatccagaaaggtaatattgcccaacataggagcagatgattgcggtattttgataccagaaaatgcagaaatgttcctagtgtgtctaaaatgtatatgagaatgaggaaacggaaaaagtggtacagagctgtatttccagatgtgcaaacagacgtatgaacatcgacatgtgcaatcaattgttaactgaaaatcaatacagaaataaagtgagaaataaaaacacttatctgcaatacagccatgagtctcagagcacggcgtgtggagaaatgtacatacacggggtgtctctgagaggaaacagaataaagaggtacttgattgcctctggagatggaaattgagaagatgggagcaaggatcacctctatgcccgttggtaaatatatgtttgtgtgtgtgtttcttttttttgagggaacaaggatcacctgtgtgcccactggtaaatatatttgtgtgtgagttttttgttttgttttgtttttgttgttgttgttgtttgtttgtttttttagatgaagtctgactcttattgcccaggctggagtgcagtggtgtagcgcgatcttggctcactgcaacctctgcctcccaggttcaagtgcttctcctgcct[133 bp omitted]tttggcttcccaaagtgctgggattacaggcatgagtgagcccgcacccggcctgtatttttttgtttgtttgttttttttcagtagagatggggtttca[143 bp omitted]tcttttcttcaag[134 bp omitted]ggccaagaaggtgaaaccccgtctctcctaaaaatatgaaaagtagccaggcgtggtggcgggcacctgtaatcccagcttctggggaggctgagggagataattgcttgagctcagga[135 bp omitted]gaccagaggctgggcgcggtgtctcgtgcctgtaatcccagcaacttgggaggccgag[267 bp omitted]cacacaaaaacaaatccagaccagcagtgattttccctaaaatgagaatcctgagataggagcttccgtactcatcacaattggagtcaactttcacgcagacctcaaggtgtccaagtactttccatataagtgttgctgctaaaaataaaataataataatacaaactccaggcctcttggattctaaaaatgggagttgtgtatctcttttttctccaaatttagcctggcctctcatgcttgagttgtctacagcagcttccatgagttcccagtgtggttgaaatcataaatatgccttctctttcatttccctttttcacatccccaaacccacgtggtggttcagctggggagctatatttccttggggaggaaagtagcacagtgggtgtcatacccaggggagattaactttcgggtcctgtagttgcccctaccagggtgagaacctggtgctcatagaaacctgctcagaaaatcgctttcttgcttttgttccttcctccacacaatggccacagttactggtggagacaaaatgtctggagtggactggagtccaagaaaaggtacatcgggcatttcctcgcctaggaagtcactggcacagaagttcagaaatgagcgagattttgaaaacaagaataggccgggtgcggtgtctcacgcctggaatcccagcactttgggaggccgaggcaggcacatcctctgaggtcaggagttcaagaccagcctggtcaacatgggaaaaccctgtctctaccaaaaataaaaaaaaattagccgggcgtgatggtgcagggctgtaatcccagctactctagaggctgagatggcagatctcttgaaccctggaggtggaggctgcagtgagccgagatcgcgccactgcactccagcctggtagacagagcaagactccgtctcaaataaataaataaataaataaataattaaaacataaaaaaataaaaattttctcggggagctgactatgagaaggcagaaatatgttaatatctccaggtgtctgtctggggtgtggtgggtgggaaaaaggcggaagtggtttcctgtaatgaatttgctctgtaggaaggagccatgttttttggcgctggggatgttaacttagtcctggtcatcaacaacatgaacatcaggcagagatacttgtgtcttacttggaggaagattcagacccggagaaggattttgatcagggaagagtcagctacagataaggttggggctatgagaataatagatgtcagcctggagtgagggtttggagaagaggaccaggaggaggctgatgtggtggcacagacaggctgtcttcagtctccagtgagcttgcactgtgggaatggacccggggacgtgggtgaggagggctcaagggtacaactgcttggatttgttcactgtatgtgaaacaaaagtgagtgagcaactagggtctgtttcactctctgccttagtttactggaggaacgaatggtgtcatcccaggatgaatgatcccggggaagaaccaggctagggagatatttataaggctgttcacggagtgcagaggaagcactgtctccctcctggccctgctgtctagttttgtttctcccaagcacttcttccctccgactttcttaattctataagtagcagcaccagaacgcgatcatgtctgttgcagagatgtgaatggagctggaggtcattatccttagtaaacaaacacaggaacagaaaaccaaataccacatgttctcacttataagtgggaactccatcaaatctccaagtcatttacaacctcttcttcccctgtccataactcttcatttgataccgtgaattctgtctccatgctttgggccaaagcattcactggaagaaattcccaagctttggtttaaggcatgagggttcatacttactgtcagttgaccttcagcaggtgacatcctcccctgccccatccattttcctcgttgtaggaagatggtaattaaccctcccgtcaagtttttttgttttgttttttgtttttttttttcctgacagcgtctcatgctgtcacccaggctggagtgcaatggcacgatctctgctcactgcaaccttgacttcttgggttcaagcgattctcctgcctcagcctcctgggtagctgggattacaggcatgcaccactgccaagcgtgtccatgtgaagagaccagcaaacaggctttgtatgagcaataaagcttttaattcacctgggtgcaggtggactgagtctgagaaaggagtcagcgaagggagatggggaaggggttgctttataggagttgggtaggtgatggaaaattacggtaaaaggtggtcatctattgttggcagaggaggaggtcacaaggtacctggtggggacatcgtaagacttattatccagaagaagaatgtcacaaagttgattgatcggttaaggtggggcagggacaagtcacaatggtggaatgtcgtaatgttggttaatcagttaaggcaggaactggctgttttacttcttttgtggtttttcggctgccccagacttcttggctccttcaggccatctgggtgtatatgtgcaggtcacaggggttacaatagctgagcttcagctcagaggcctgacaaccaccacactggccaattttctttttttttaaatttttagtagagacagggtttcaccat[138 bp omitted]catgcagaagagattaaataaaattagacggatataattgtgtcttgtttcttgttttggtttagaaatataagtgtattttcttgaatagatatgatgcaaaaatatttttaaatataactcataaacttaaagataaaacctaaagaaaaagaaaatgcggtaaaacaggtgggaggggaagcaggaaaggcaggcacactcgtgtaactatgattgaaagaaaatctgtatacaagtggacctgcacagttcaaacctgtggagttcaaagctcaactgtatgttactgcaaatgattataagtgctgttatagaaacattcaaagaccagaaaaggaccacaatggctgaccacacatagccaggaagagcttctcccaccgagagaccaggccatcaagaagaccagaatgctctgggcagatcttctgaaagagggcgctgagggtggatggagagaggacacagatcctgaggatggatggagggaggacacagatcctgaggatgcatggagggaggacacagatcctgaggatggatggagggaggaaacagatcctgagggtggatggatggatggaggacacagatcctgagggtggatggatggagggaggacacagatcctgagggtggatggagggaggacacagatcctgaggatggatgaagggaggacacagatcctgagggtggatggagggaggacacagatcctgaggatgcgtggagggaggacacagatcctgaggatggatggagggaggacgtagatcctgagggtggatggagggaggacgcagatcctgagggtggatggatggaggacgcagatcctgaggatggatggagggaggatgcagatcctgagggtggacggatggagggaggacacagatcctgaggatggatggagggaggacacagatcctgaggatggatggagggaggacgcagatcctgaggatggatggagggaggacgcagatcctgagggtggatggagggaggacgcagatcctgaggatggatggagggaggacgcagatcctgaggatggatggagggaggacacagatcctgaggatgcatggagggaggacacagatcctgagggtggatggagggaggacacagatcctgaggatggatggagggaggacacagatcctgaggatgcatggagggagcacacagaccctgagggtggatggatggaggacgcagatcctgaggatggatggagggaggacacagatcctgaggatgcatggagggaggacaccacgcccggctaatttttgtctttttaatagagatggggtttcaccatg[137 bp omitted]atctgaaatgtaaatggtttttaaagaattcaaattaggattcatcaaaaataggactgtctttattgttgaaaaacattgtatttctttaataatgaacaacttattaagttatgatgtgatttaactggtatgaaaatttgggaaattagaatcttggtaaagtacagattagttaaaagaaaaagatgctttagaaaaatcaaagacatttccgaaagaatgtacaataatcaatagcagtttggccccagtgttatagaggatggggagaaggtggaagaatgagaaaataacacgcatttcacgtagtatatgtgcacaaatctttttcttttgttgcgaagaaaatgttttatcacaacaaatgtaataaatttagcaactttgttctggagatcaatcaataaatccaaataggagaaggaggaggggtctgtaaaagcagaaagcaatttcagaaatgaatatatatagtgtactaaataaattgagctggatggtaaataaaggcaacaagaaaatatctgtgaatcctagaccagctgtgatgatggctctgtatgcccttaaataacggcaataattcatgaaaaaataaagaccttgtcctttctttatcaaagtgatttattatttatttatttatttatttatttatttatttattttttagagacagagtctcgctctgtcacacccaggctggagtgcagtggctcgatctcagctcactgcaagctccacttcctgggttcacgccattctcctgcctcagcctcccgagtagctgggactacaggcacctgccacc[184 bp omitted]aggcacattttacttcttggaacggcaacaggaaaattcccatcccgcagctctcacaactcagatcttagcaattggaacagaacaggttgtcactgctgaaggaccaagcagaacaacggtttcaggaagctttagctctaaatcccagtagatgtagagcaggtgcagagctctggggactctcaaagcacttttaactctggttaagtgtcagaattgcatttagacatcaacacatttatattccttgattctttcttctccctaagccttaaacatatagtcaccttttatcaaaaagatattttatttgtctaaatggaagatatagtttactttcttcacacagatgccagaaattttctatgaacgtaaaatctttggtgcaatcaagtgcatactgcttcccagatcctacaagaaaggagattaaggtgtagaattttacactcatcacagaaagttttcagagactaactggcatcaccaaccaaaacacaacatgctatcaccacaactatttttaaatgtcttaagtagtagtttccattggacagcaggtgtgtaagcaggagccaagagtgaaacacgctcttgctcctcttcctagcaagagagcaaagactgtgaggtttggtgtattcatccagagagagtgttttaaatggggctatgacagagaaggtagacgaggtgttgggcagccctggacaccctcagaaaatatcccttcttcatgaatttattttctatgttcagttttacactaaaaggtaaaaaaaagttaaaaaaaagaaaaaaaaagtccaccctatagtttgtataacaaacattctcacttgttcatgctgtattcaacgtcgagcccattttctttcccctactacaaaatcccaccgctggggtcctggtacctacagtgatggttctgaataaagccctccttactctgctttgataaaggtcaccgggtaatctttctctcaacgccttgcccagctggcccagggctccaagaaagggaaggccagacccctggcctctgccctggttactcacagggacatctgtgaatatctgctgctgccccatctggccccggtgaggctgctcctccctttcacgttgggccccactgcagcctcctggtgttcaccgccagggcacaccccaggggaactggggtgggatcataagcacagggtaggccctccctctctgcctggccacactgcactgccaggtgaattaaacatggctcttcccccaggtggtgcttgggggcccgtgcagcaggagggacatcttctccgcacagcaatgttcccagatctcaccaccctgagttctggcccctgcgttgggcgggttggcaagtcaagagaaaaaacaagcccctgcatctaattttctgtcttctctctgggcccttcctctttccactaatatgtcaagaaataacagtgtggtatttttgcttaatttcccctaaactctatctgtcctgctttccactgtgacctcaccacctgaacttcctggacttccttacactggagcagacactggcatctgctcagctctcctgtgctctgcaaggggtagaaaaattcacccatcctctgctatgtgcagactgtccaccttctgctatagagttcatgtacccacctgtcaacctcatagtcaaacaaacaagacgttatgggagaaaacacccagctgatggttgaaaaacaaccagagaagaaagacagagatgtagaaaaagagacaaagacggctggacgcagtggctcatgcctgtaatcccaggactttgggaggctgaggtgggcagatcacctgaggtcgggagttcaagaccagcctgagcaacatggagagccccccgtctctaacaaaaatacaaaaaattagccgtgtgtggtggtgcatgcctgtaatcccagctgctcaggaggctgaggcaggagaatcgcttgaacccgggaggcagaggttgcagtgagccaagattgtgccattgcactccagcctgggcaacaagagcgaaactccatctcaaaaaaaaaaaaaaagagagagagagacagagagacacacagtgagagagaaagacagaaagagagacagggacagagacagacagagcagggagaatgtgtcccacgtgaagaacagggaaaatcggtcacaatgttcacacaagaaagcaaagatacagagtacagcactgggaagcagatcccaggaggaaattaaacctgagcacaaatagaaaattaaagctcagtacaaattaaaattgggtaggccagtcaggtaccaccctctttgaaccagcacagaaacctcccagcagaccgagctgcagcccatcccggggttcataatgtggagtcaggagcctcaggtgggtctgaagcccctgtctctgagacttggccgaccttggacaggttacttcatgtctcggtccatagtttctgtttttataaatgaggaaaataatagagcacgctgtggagggtttgtaggagaatttaatgtgtccacgtttgcctagaactaaattagcaactgccccatagaaagagctggctgagtt[137 bp omitted]tccctcagcctcccgagtagctgggactacaggcacccaccacc[182 bp omitted]aatgagattctgccgcctcctagtggtacatagggtaattttctgtgtcaatcagtacatctgaccctacaggtagggtggatactcagaaatgcctcaaccaacagcaggctcagtgattccttggatttcctggggcgtgtgagtgtatgtgcatgtctgtgtgtgtgcgtgtgtgtatgcatgtgtgtgagagcatgcattcctgtgcatgtatgtgcagatgtggacctgtagggtcggctctctgccttcacccagccacacctccctcattcattcctgatacacgtgatttgtcagaaaacactgacaccaatgtgaagtcctaagatgagcaagttcagaatatctaatgtatcgtatctgtggcgatgggtgcgctgaggaattgattgtgactgtcattgcacaatgtacgtgtacgacaaattatcacattttacaccttgaatacgtacaatcctgatcaattaaattttaaaaagaaaacgctgacacgttttcgtaagtcctgtttccctcactcagctttgaacaactgtgaaggcagagagtgggtccgagagacctatgcacccaggaccaggcctggggctgccagatgtgaggccttcaaaattatttattgatgcgtggagtaaagcacaacccagagaactgggcttggctctcagctgtgtgtgtatagcacagtctcaaggctagctcttgacttctaggaaggtctttagggtcagcagggcagataattacagcaaagtctctggggtcactggaggttcacagcagacacctaggacaagcttggaggtggcatcactgctcaggaaatcggctgattggctgtagctgggcctttagaacaggcaggtgactttagctgggtctctggaaacagtcaggtgaataaagctgggtctctagaaacagccagggaactgtagctgggtctctggaaataactgagaaacagtctgtccaaggagctgctcgattgtagaagggaccacctggctaacgaaccttctggatgctggttagaaacctccagtctccagctcttgtctccaggacagctgcctggctggctttctagatgaagaggaatccaacaggaagccttccaaatggctgcttcaggcttttcctagagtgactttctaccctcaggtgcagaggccaggtgggtatggggtcagtgtctggcaacggctgcatacgtgatggactcggccatgggctttgtggactgtggggacacagcccgggctgtcctctgtgtgagggcccagtggtccagctgagcatacgtcacctcctgggaactccctgcagccagggcctaagagggagagacccagggtgagggagtgcctggtggagggtgagacgaggggctgtggggagggagggctgtggcggccatctccatgggccctgaggaccctctcctaaattgcatccgtgtgaagagccctcccacagggtattggggttggtttacgtgacaatgaacaaggcagaagggaagactcctgacttccaagctgagccaaaagacatggtgcttctgtcccctccctgccacccatccttggatccctccctctgggggaagccggctgtgtggagaggcccctgtgagaggaacagaggtttcctgcccacagccggggaagtgagcgtcttggacgtggatcctccagcccacgggagccttcggatgcacacagccctgggcgacctctcgacagcaacctcaggacaggccgtgagccggaaccgcccagctgagccactcctgaattcctaacccaaggaactgagatttttttaagctgctaaatttggggtactttaataactagtaggaaggctcaccgaggtgtccgtctctctgtccttctcaggaagtccattgactgtggccttgtcttggggagaaaatacatggtcagttttctggggaggatgtcgcaaggcaaatctgcctgagacccccacccccagcttccgatgacatcctgcacccaatgtataatacgaccttctagaatgttcccaaagattcttccccccaccccccacattgcatctggattggcaccaagtccccacttccccatcccaggcctgtccctcctcctccccctttacctgctgtcctctctagaacatcaacagccaggtcaggcctaagaggaaaaataaaagtgaacctcaggggcagcctggcggccgaggactgggtggaggtccaggagtcattcccaggggcctcacctctgctgtggcttctgctcctcgtccttgcttctggggggccctaaggacagtcggggtgtgaattaaggagaccttcttcctagcctctcctgacagcttcccaggtcaccccaccctgcccctgagacctaccctgctttatctgattctggcgatggaggcagaagaggaccaggaggaggagacagaagaggaagaccactgagaccccgatgagaatatacagatgctcagctttcaggccttgggaagcaggtgcatctaagaaagacagaaacaggatttcagcagtgtgcatttattgagcacctactgtataccacacacacgtcacgtgcgtttcatagacttactaatatataaaatatcttaggtaaataatagtcctgcagtacagggatcgttatccccttcttccaccaccggggtcctgagtgctggagtcctctgcacagggacacagactgccattggcagagcaggaatctgatcaaccccaaagcctgacctctttctccttccccaagaggcacacaccagcttcatgctccacggcccccatcactcacgctcattgtgactgttgtccgacggcctctgcgtgggtcctgggagggaggaatcagaaggaggaggagttagagtcctgagctggacagagaaggctctgagtcctcccacatccactgtggggatctcccttcactccccaggaccctgactgctccctctagaccagcaccgaccagcagagtcttctgtgatgatggaaactttctacatctactgtccagcatgagagtcacacatagctattgatatttaaatttatccaaagttgaatggcatgagaagctggctgcaccgtctgcacctccaggactcagtgaccccacgggcctgatgccatccctactggacggtgcagatacagcgcgtttcctgggcgtgaagctgtagtagacatcgctaatttctgccctctgcggatctaggcagagaccaaccacccgcaacaagaggaagggagaccttccctccctgacctccttctgggttcccaccagagggcaagaatcctcatgtctgattttatctgccctcccggcaaccctctgacggggatgtaacccgccctcctgtgggaagaatccaagtcccgatgtgctcctctttcctgaagccctgcagctagcgggcgagtgtgtggggcaccgcccaggctccctacgcagcgcattgcaggcccgcccgtcatctcctccaaccttcaccctcctctgcacagtgcacgccactacccaattcccaggtggctaaatggggtcctgaggggctcccccaaacccagggtccgagccaagcgtccctcttccaggaacagcggtccctcccctcccccggggctgaggcagcatcttcaatatccttcaagaaaggcagacattctctcttggaatgtccttccctcctgcctcgtccacggtctaaggtccaggacaccacccgttattctacaccatgacttcctgggcttggtcttcataacatttgccaccatttaaaattacatatgtattatatatgtgcaatattacagtttttatattatttatagttatatgtatcatgtattatgcaaatgtataatatataacaaatatatttttaattatgtaatcttgacatatacatataatttaatgtatataatgttaattgtatatgatttataacttataatatatgttacatatattcactataatatataatgtataatttatatttgatataaacctatgattaaatataaaatattttttctattatagttatacataatgtatacataatagataatatatttacattaatacctatatttatttattaactataacacttgaaatttattatactatatattgtaaatatatctttcatataatatataatatacactatagtcatatgtagtgatacactaacatgttttattatataattatcttccttatatatataatatatatataatatatatatatattatgatgtaaacatatataatataatttaaattataggtctgaaattctacattgcaaatcatatatttttatctgtatatgcatgtatgggaatcagtgcatttctattgctcattctaactatttctccccattgaagttcacaagacgggaggccatttctcctcattcttggtgcatcaaatccggaggcttcagtgcctggcacagtccctgtgaggacaaaatacttcctcagtattaataggagcatccctcctttggggttttctaatcagcactgatgtcagcgccgtgtgtacctgaactcaagtctgccctaaacgattctaccaggacagctcttctattgcctctgtttcacatgaggaatttgggacacaggaggtttgggtgagtcaccgtcaggcatagagccaggaggtggcagaaccaccgggatttgaaccatgaacccagcaatctggctgcaggagggtctgtcctcgtgacctttatatgtcactgcatgaaggtgagagaagagagaaggaaggagaagaagagagggagagaaacagaggcaagatattcccgcagacagaaggctaataaaaaccagacactggacttgaaccaggtctgcgggactcaggagcatgtcccgctgtgccccagcagcccaggagcctctgagggggtccggatggagcacggcatcgctcctcccacctccccatgtggcttcagcccctggtcccacctgcctgagctcacagcccgagcctcacaggcagtcaccgggtctaggtccaaggacgtactctggggatagaaacccaggtggggaaggggccgcgaatggcttatgaccccgtgtcctcccctgggagtttctggtcacagatcacagggggagatggacaacttgagacccagggacttggggcagcttcaatcccatcacagagtccagggcagagccagatggaagggaagcctcatggcttcatcctggtcaccgttcacagctacgtcccctccctgtggagccctcctcctcttaagggaccttactccaccgttcaggcctcccccggagatcacagagccaacaggagcagccccgtccctctccgggtgtcccaggttggaaggtgagttctaagtccctccatcaggtgcagagcggggtgaatggtgaggccacgcccacaagggggcagcgtggagctcgggcgagcccggaagtctggggtggggctgcccgggtgggtggcccctgccccttcatggccttgtgccgttaagcacgaaactttaatttatgttttgcatattagagaggaggaggagttagaggatcagactagtacctcccccattaagtggtgcttgcattaagtgctttccacagttcctggcatggaacaaggttgcaatcacggtaccattgctgctatggtctctgtgagcattagcgacctcccagagcttggtgggtgtcggtgccttcccgtggcctccctagaccttgactccaagcccagggcagagggctggacccggaacagcatccgcagcacagattcccctgtaatcccctccagctgagggccctgctactgaccagctgaggagccgggctctgtgtccggggagtccgggcctccagagctttctgtaaacaggggcaggagaaggatttagaacccgtcccaaccaacctgccctcctccaccctgagcccccatccaaaggccgcatgaccatcacgcaatcccagacaatgtctcgagactcctgagaaaacggggcaggggacaggaggctggggagagccccgctgcttgccccattctccctggggctggtcactccctctgctcctcccaccacaagctcttcttgacctcaggggactgctgaggtcctggagggacatgaagatgggttggatcctctccagtggactttgactccaggacatctcgggctgagcacacacaggggtgcatgtggtcacataccaaaggttttcccaaagcactgtcccgccctggtcaggggccatccctggaccctgcgttctgcccagtgggagatgaaccacaccaggagaagcacattgcctggggcaggttctggctcagtggaaaggaataagcgggaccatccatcccgtgtgaaaagacactcatcctcttgtaggggggttgccccctaatctctgggaacccactccccacccagccaagcagagccagctctgagcccaccagatgctggagctgagtgtccacgccatccgtggcgtccagaggagaccagggctccaggaacctaagcaggtgtgagggcagaggggaggtgtgtgcagaggaagaaggggaggggagggcttggggtcaggaggaggacaaggttggccacagaggacagcagctgggacagggtccagggacctggggacaagctcgagggtcgagctgagactggggcagggcccaggtgacgtcctcacctttcaccagcagctccaggtagtcactctgctcagaccatttagggggcttataatagatgcagcgataaagcccggcatttccttctcttactgagtcaatgcggaatctggcctctgactcagatggactagcttgagacacatcttcagtatcattgtatgtggatctactgtccctctccaggcggaatgtttgaaccccaaccgggccccggcacacgaaagtcacatggctccccagggggatcacggtgcctggctcagccgagatggagggtctgggcagatcttctaggagggaagcagagcaggatctcagcgtccactgtaggaagtcaccatgccacacacgtcattttagcatcacaattcagggattttagcaattttatagagttatgcagccatgaccacagcccaaccttagaacattcccacgcctcctgcaccttctacgtgcatgtgattctcatcactgcagagttttttcccagttgacagtgaggaccctgagacttgctcacaacttgggccttgctcagggtcatgtgggaagtgtcggagcagcctggagcccttcatgcctgctgcagagcccagggccactttccagagggacagagtgtgggagggaggcacaggatggggatgacagggtcattggtgaaggacaagggacagagaagcgagggctctggagatggcttgtgctggggcctgaagggcactggccggtccccgggtgggactgagtgtgggacgggggttgccaggctcctttgagggtctggtggggtgagggtgaagcccccagccctgatctgctcacagcagatgcccagcccgtgacaggtccccattgctaatgcagatctctgtggagacaccacctctgggttttcctctatagtttctactttcttctcagcctaatttgcatttccttcttattaaggctcttgaaaaaccccatttatctcaactgggcttggggtggaggaggaagggcgggtttgacgccctgaaacaggaaggttgtgtcaaaattagcaaaatccctgagcggggcagagagctggcagggcttcaattcactcgtcccgtcttcattcattccttattattgacaaattaaaactgcatgtatttaaggtgtacaacatgatgttttgatacaggtatacactgtggaatcgctgaatcaagctaattaatataacctcactttgcgtagttaattgttgtggtgagaacatttaaaatctgccctcttagtgattttcaagcatatgatacattgtgattaactctagtcattgtgttgcacaatcctgaacttactcttcctgtctagacgaaattttctatcctttgaccagcatctccccaaacccacccatttgttcatttttctttcttttaaccatatctcagttacttatcaatctgtttaaagacgtttttcatgggctgctaattccacaaatgtgagaaacacacacaggatgcctgccgtttggaggtggacttccagaagggaggaccggtattgatcaaagaattgtccaaatctgcagctgtgaactgacagagtcttgctctgtcacccaggatggagtgcagtggcgcgatctcagctcactgcaacctccgcctccaaggttcaagcaattctcctgcctcagcctcctgagtagctgggattacaggtgcactccaccacgcccagctaatttttgtatttttagtagagacggggtttcccccatgttgtccaggctggtctcaaacttctgacctcaagtgatccacccacctccgcctcccaaagtgctgggattacagatgtgagccaccgcacccagcctcattggtcatttttaaaatgaattattttttttcaaaatcagcatgtgagaagaaccaccatattgagcggcatatggagtgtttgagaaagcgaaagaacctggaggaatgtagagatgagtgagccccaggtcacagggacaggatgtggctgggaaaatgggcatgtccagaccaaagagaggtgcacaggtctgattctatctgaagataaacaggggaagggctctgagaaaaaaaaaaaaagatttcatcttacgatgagatattaaatgaaaatttttgaatacaatttaaaaactgtggaaagtacaatggtcatggttgtgcttttgcaaatcgccagtccctggggtcaggaagggagcaggcagcagtggcatggacaggctgaggccggcctcggggagccacggaggggagaggggctgtcacctgggggtgatgcaggaaaagtcgatgaagagagagggaaagatgagaaaaatttagagtgaaatcaccaggactgggtgacatggtgcatccaggaggatggagaagaggatgagtgttcagagtctgccctttgtgactgtcatgttccccgccaagaagctgccgagtgaagtgtgggctcgtctggggaaaagtgccgggctcagccttggttgtgttgggtttgaattctcattgtggaaatcggtgtgcggagctgacgcctgcactcccagggtgaccgcagcactactcacagccgccaagacctggcaagaacctgagtgcccaccgccaaatgaatggatgaggagaatgtgctgtgtatatgcaatggaatattattcagccctaaaaaaggaaggacattctgtcattcgcaacaacatggatgaaccagaggacgttaggctaagtgaaataagccgggcacagaaagacaattactgcgcgttctcacttatctgtggaatctaagaaaagttgatcacccggaagcagagtagaatggtggttattggaggctgcaggtgcggggcatgggagagacactgatcaaatgatacaaagtttcgagtagccaggacgagtgaatttttcagatctatggcacagcagaatgacagtagttcataataatttattgtatatttcaaaattgctaaaaggagatttaaaatattctcatcacaataagtatgtgatggggctgatatgttaatcagctttatttaatctttccacaatgtgtacatacgtcataatatcacactgtaccccgcaaattgcaattatttgtcaattaaaaataaaatttttgaaaataagaaaagcaaaataagacaggtggaggatgcgagagagaactgggtgagggttggttatgcattttacatttggaagagtttgcaatctagggtatatttaaagggatctctccaggccctctaagaatcaacatcactcccacccagcactgcccttggggtgacagaggggactgggaagatgggacgaaggcatgacttaccctcctgcgtgtggatggtctgggccaggcagagcactggaagagaagccccagtgagaaaaatgcccagtgcccagtctccttacggggctgctgtcaaaagggggctcgatggagctggggggcattcagcatttcataacgaccaagccaaccctcctcgacatcactgtctccatgtaatccttcttgctgcaaaatggtttcaagataaatcccaaagtctcctcctccaaaaaggctcctgctcccccagcccttcttaaagctgacctcatccccacacccgggcccctgtttttaggacaagatcttctctgatcagacttaggccccagggagagcagcagggcagtcttgggaggaggaggacactttcctccccagaatcttctggactagagtcaggcttgagcagggaattttccagacctcccgaccccctttccagcctcccggctgcctccaggactcacctaggcccaggagggcggtggggtggggagacatggcccaggtcccagcagtgcagcctggcctgaggcgcaccaatgcaaggacagaactctgcagcagacacaagcagacaggatgtgctgcccgggggcctcctgcctatggggcttccacagcaactgcctcacacaagaggaagagctttctgtcctgttctttccacccttcccactagtgagacgagagggagggccttggtttctgaaaaatgtcgcttaccctaaatgtcgcttagaggcagatgaccgtaaactagttaccagatgtgtcagcctctttctaaatctatgggacaaggcagaataaaggtcgggcaaccaattgacttggacgccgtcccaactccacaagttaacggtcgcagctcttgggcaagacgttacaaaactagaagctgacatttccttgtattacaaatgggagccatagaaatccttccccaagtttttaatattgtgatctatgctaaaatcccgacaaggtatttaacacgttaaaaatatcctacaaagcatattatttttttaaggagactattggtgaggatgtggagaaactggatccctcgcataccacagtaggaattaaaaattgggcaatcactatagagaacagtggggaggttcctcaaaaaattaaaaatagagctaccatatggtccagcaatcccacttctgggtctgtatttaaaagaaacaggccaggcgcagtggctcacagctgtaatcccagcacttcgggaggccggggtgggtggatcacctgaggccataaattcgagaccagcctggccaacatagtgaaaccctgtctctactaaaaatacaaaaaattagctgggtgtggtggtgggcacagctacttggaaggttgaggcaggagaatcgcttgaacccagaaggcaggggttgcagtgagctgagattgcaccattgccctccagcctgggcaacaacagcaagactctgtctaaaaaaaaaaaaaaaatcagtatgtcaaagagccgtctgaactcccctgatcactgcagcactattcgcaatagctaagacgtgaaaaccatctaaatgtccattgatagaataattgatatagaaaatgtggtgcacacacaggggaatactattcagccttaaacaaggaagaaaattctgccatgggcgacaacacggacgaaacctgaggacatcacgccaagcgacgcagaggcagagaccaagtactgcatgatgtcacttacaggagatctgcaaagtcaccagagtcacaacatcacagcagggaatggtggttacgggggctgggaggagggggaaatggggagttattaacaaacaggcctagagatctgctgcaccacatacgacccatcgtcagcaataacgtcttgttcacttgaaatttgttaacggaatagacctcatgttatttggagggcccggaggaagacaggaagagaagggaatgtttgaaacttcttagagatggattaaatggttgtgaccaaaatgctgatagtgatgtgaacagcgaagtccaggctgacaaggtctcagctggaaataaggatcttacttggaactagagcgaaagccacctttgttacgccttagcaaacaacgtggctgcattctgtccatgccctagagataccacgccagggtgtctggcggaagaaatttcttttctttttttttaaacggagtctcgctctgttgcccaggctggagtgaagcagtgcgatctcggctccctgcaacctctgcctcccagattcaagccattctcctgcctcagcctcccgattagctgggactacaggcacccaccac[179 bp omitted]aagtggcatggcttcttgtaccaacctaggctcagatgtgggagcaaagaaattacctaaaggtagagtttatatttaaaagagaagcaaagtgtaaaagttcgaaaaatttgcggactagccacatggtagaaaagaaaagtccgttttcaggggaggaattcaagtaggctgctgggcaacgacttgctggagaaatttgcataactaagagggagtcacgtgctgtaccaaaacatctcatctaccccataaatatatacacctactatgtatacacaaaaattaaaaatttaaaaacatatatagtgacatgagatgtagtgtgaaatgtcattaaaagatgagtttgcatcagaatagtccaaacgtttcaaaaacattccagcatgatcactgccttgctgaccagtcttcctcctgagacgtggtgacagtaatgatcacaaacttggatctcgtggacagacaggggaattcaagctaaaccctggtcctcaaagagttctgcatgttacagtccctggtatatccttccaatctaatccaattttctgtgagtccataagacagcaatccatctaaaaaataacaataaaccaactaaaactgcttaatataatatgttaaagattttttaggccgggtgcaatggct[168 bp omitted]gaggcaggagaatggtgggaacccgggaggcggaggctgcagtgagccgagatcgtgccattgcactccag[145 bp omitted]cccgggttcacgccattctcctgcctc[224 bp omitted]gctatgcagtcaaaagttaaagaaagatggagtccccagcctcaagctgaatactgaacctggagctcaccttgatgatgatgaattaactgagctttattttcatggttttgtaaatcatgaggacaaggataaagtgcaggggtacagattccaaaagcttccacctcatcataagaatgatttcaaatcactcaccaacttctcatggttgcaaggaatactacatttgttttgaaacttagcattgaacatgaggccaaaacacagtggctcctgagaatgactttcctgcttctgactcttcttttactggcataatggtttctatgcattagattatcctccctgcctcttttcactttaggtcttcattagtgatttttattcagctttatcaaaggatcctttgcacacaaactgcatccacttaatctgtgcaattcagtgaattctgacagctgtgaaaccaccaacatatccaagattttcttcactgctcagaagattcctcatgctcctttgcctccatgtggccactggttcctttttgatatgtatttgttgactgatttatttatttatttatttatttatatatttattttgagactgagtttcactcttgttgcccaggctggagtgtaatggtgcaatcttggctcccgggttcaagcgattctcctgtctcggcctcctgagtagctgggattacaggtgcgcaccaccatgcccagctaattttgtatttttagtagagacggggtttctccatgttggtcaagctggtctcgaactcccgacctcaggtgatccgcccaccttggcatcccaaagtgctgagattacaggcgtgagccactgcacccggccgactaattcattttttaaacacacttcttacctgggaataaatttaaacttgcaaaagagttgcagaggtacagagagttcccatatgcccttcatccaggtccctctaatgttcatgctttacacgaccccagcacatccgccaaaaaaaaaaaaaaattaacactggtacaataattaactgacaggctttctttggatttcatcatctttccactaacgttctttgcctgtgctgggatccaatgcaggggcaccgtcctgcatttacttccctctctgttaactgcagagaagggtttctgttttcctggttggaccctgattaatattcccctagtatctgaactccaggtgcccaggaaggttggggggcaaggatgtgctgcccactggggaaggagtggctggcagaatcgacatccgtctgttcctccacaatccaaggtcacagaacacatgggcagttattctgggtttttccataagaagggtgatacagagctgtcgttgttccatattatgaggacccctccacctttgcattcctctaagacctttcctctgagactctcctccaagctggagaagacaagctacatgcttatgtccaaggcatgctgcagattcagcatggcacagctccctcactcaaaaacgttacttgatgtgggatgcacaggcatagagtagtgattctcacactagactcagatacatacacaatatttgcaacttaaattaaacaccaattaaatgtcaagtggaaagacaacatctacagaaataaaatgacacaagatgcaatgtgaaatgtcattaaaagaagagtttgcattagaatagttcaaatatttcaaaactattccagcacgtcactgcgttgctgacctatcttcctcctgagatgtggtcgccgtaatgatctcaagcttggacctcgtggacagactggggaactcaagctaaaccccggtcctcacagttcagcacgttgcaatcctgtgtcgttccgtccaatctaatccaatctcaaggaccccagttcctgagcaaccctggcttggctcggccaaagggaagcgtctacagaatctgagtctagaatgcccggaggtctgtacttcttgctgttttcaggagattcaactgcaaagccctccccaagtcatccacattggctcacgtttctgtgccccacccttcctgcctgggaggacccttcttgttcagccaaaaaagcaacctgagggtggtgtggtagcagggactcacccatttctctttccatcttctgtcgcggatgcaaccctggaaggaagacctcaggacgatgatcatcttcataggattcccgacctgtgcctggctttgtcctgaatattagccttggcagcctggcctgggctccgatggtggatgaacttggctttccacgggctgccacctccagcctgcgctgtggagagaccaggtcctcggaacagtattttaaccttgtcctcctttcccttccagggtttaccaagacatagcgggtgtcatagatgtgaaaaagcttctgctataccagggtcaggaacggagcaaaactgaaaaccgcacaggatgtggtctgccaggtgccagcatcacagctcaaatccttaagaagctccagccgcaggcacggaaataaacagcttctccctgccctgtatacgtctccgattttacccaggatggggctgaggaagcaacacagattcccaaacgttacttttttttttttattttgcttgagagccaaggcaatattagacaagccttactccctaattagtgcctgacaagaaccatatctctgtcccaatccttctattcaaagtaggcacaatttgcttttaccaaatgtaaaactcatgtcaaagccatgctgtgagtatttacaccagagaaatcggcaaatgctacacgtcggggttgttttttgtttttctttttgctttttttttcagagagctgattgtcaagactttaccagcacactgctggtaaatttccaaaggccaatttaaagaaatttttttaacagaacatgtaaaaaaaaatcaacgtgaagtcaacatgctccagggaaatcagacaattgataaagcatgtctatttctgtagtgtatactccagcctgtttccccctcctacctcaggtaccgtaaccagcatctgaagtcttatattcaaatttcccttgcacttttgtaaatatagtgttctctcatcgatgtacctatttggtgtgtatgtatatgtgtgtgtatatatatatatgctatcatttaaaaattgtatttatttatttaaggtgggtcaccgaggctggagtgcaatggtgcaatctcagctcactgcagcctccacttcccaggctccagcgatcctcctgcctcagccttctgagtagctgggattataagggtgtgaccccatacccagctaatttttgtatgtttagtagagatggggtttcgccatgttgaccaggctggtcttgaactcctgccctcaggtgatctgcccgcctcagcctcccaaagtgctggaattacaggcatgagctactgtgcccagcctcgtttttaattttagtgcaaagtatagttttcaaaacaatgtttgcaatgtcatcaaatatagaatgagcacgcatcaatgtcttcttaattcattaatgatgaaatcatcattcaaaattcctgtctttacccaaatatttagcttcttctgttgctcttcatttgttcctgcgtttctccatttccactgggatgatttcctcttgtccaagccttttattctggcaaccaatgaactttacactctttctatagttttgccttttccagaatgtcacatagttggaatcagacagtggatacgccatttgggcgggcttatttcgtgtagtgatatacattgaactctcctccacatcttttcatgacttgagagcttgtgtcttcttagcatgggataatattccattgtctggacacatagttaatccactcacttactgaagggcatcttggttgcttccaagtttgggcgattatgaataaagctactgtaaagatccatatgaccgtatgttttcagctcccttcggtaaatatcaaggaatgcaattgctggattacatggcaaagctatatttagttttagaagaaattgccgcactgtctcccaaagtggctgtaccatttggcaatcccaccagcaatgaatgagagttcccgttgctccacatcctcgccagtaggccagtatgtggtattgtctgcgttttagaatttggccactctaataggtgtgtcgtggtaacttggttcctaagatactgatagaggtgcagaacaccagctgggaagtcagccagaatgagcttctcctgtgacttcctgtcccacagcctcagagaactttgacaagccacttcccctataaacttgtctttctttctttctttttttttttttttttgagatgaagtctcactctgtcacccaggctggagtgcaatggcatgatcttggctcactgcaacctccgcctcccgggttcaagtgattctcatgcctcagcctcgtgagtaactgggattacaggcatgcaccaccacacccagataattttgtatttttagtacagacggggtttcaccatgctgaccaggctggtctcggactcctgacctcgtgatctgcccacctcagccttttaaagtgctgggattataggtgtaagccactgagcccggcctccttataaacttctctaaatctaaatttgtgaatattctttctttaaaagtcgatcaactggcctggcacagtggctcatgcctgtaataccagcattttggaaggtcgaggcggatggatcacttgaggtcaggagttcgagtccagcctggccaacctggtgaaaccccatctctactaaaaatacaaaattagaggggcatagtggcgggcgcctgtaatcccagctgcttgggaggctgagaggcaggagaattgcttgaacccaggaggtagaggttgcagtgagccgaaatcgcaccactgcactccagcctgggcaacaggagcg[138 bp omitted]ggtgaaaccccatctctactaaaaaaatacaaaaagttagctgggcgtggtggcgggcacctgtagtcccagctacttgggaggctgaggcaggaaaatggcatgaacccgggaggcggagcttgcagtgagccgagatcgcgccactgcactccagccagggtgacagagcgagactccgtctcaaaaataaataaataaataaaataaataagtcgatagaccaatatttatcaattacctcttatacgcttggtgtttgagattcaggaatgaacaaaacagatccagtccctgccctcaacctagctcttagtgtaatgattatgggaacagggtcaaatagcaaatcacaaattatttcacgactattgtgagacaagagtgagagccaagagtggtggtgcacacctgtaatcccagctcgaaccagggagacagaggttgcagtgagccgagatcgcaccaatggcttaacacaatgggatttggcttttcactcatgtaaatgaccagtgcggttttctctggggcagaatttgaattttctccccaggatgactcagggacacccgcttcctccattgtgctcccatcatgcccttgggcaatggcgtcccgtacttcaaacagcaagaaagaaggagaaacagaatatatctgtgcacttgcaaaatttgctgacacatgtcatttctgtccagaattgttggctataaatagtgttatgaacagtcacacaatgatgcaacaagaccagggaaaaagtcccttggtgggggtagccacttcccagaggttccaatgcttgcactgtaagggtaagtacagaattttttttttttctggtgagcagccacatatttctgcctcacgtgaaaaataatctcaagaagaaatgtacctgagaatgtatagcccaggagcatgatgttgtgacacctgattgatggaccatgtggggtgattgactcccctgtacttagaaggaaatcaaaaccaaaggttcaagtaatattaaagagaaacattgtcatattccctctggaacccatgcacgtcttagctaacctgcagagaggagtagaaaccactagaactgaaggaggcagctctgtgcaagggtgacggccttctcccctcccagttcccttagttctggagttcgatgaaggacggggtccacacggcccactccgtttcctctttctctgaaccgggggtgcagaacctgaacccagacaacccctgggtatgagtccggccccagatcacagctgtggttttggctgccgcagtgaccttggcaaagtcctgagtcgtttgctgttgtgggtatgatggacagctgcgacgttttcctggactcccactgaaatctttaacttcaagatcatcttctccatcccaacagaactcatcaggcccagaaggctcccagccccagaggttcccagagctcttcaggtggaatgttgagtctgcacaagccaggatggtgactctggagaagttctccagaaaagaatcagcatctagagtctcctgagttccaggcccttagaaatttagactccagaaccactgccaaagtgaccccctcagcccagcccttcggtacccagcatccactgtcctcagcccagcccttccgtacccagcatccactgtcctggtgggagtccgctgtgctgctccaagaagacagaccctcaccattaccggaaagactgaccctcctgtgtccaggtcctgtggcccagactcagctctggaagagaaatctggatttacaatgctcagtacgtcgctcaaaatctgcactcgatgacgtctgtaagctcttggtcccagcctgggctgcgaagcctgaggcttgggcagacaatgccgtcccgccgtcatctctgctccctcttcgatcgctaagctcccacagcattgatctaaccagacatgggcccagggagagagctgtcttccccacctcccagccccaatccctcaatccctcgcctgccgtgccaagactggtcaagggaaagtccaggaagaaagcatggtaaggggcaccgtgctgcctgcgcccgccccgctgtgcagaatgcagaggctcaggatgcggtgcgcagagactcagtcccaaccgtcttgtggcttcttaccacgtatctcccaggaagtcaccatgaggcttagttcttccttcctgtgactggggtaaaggagagaactgtctccttggacatcatcatccatacgcccggcccgaacgtcatctctgacccaaacaccaaatccagacgggcaaccacggctgtggggtgtggagggggaatctgaacaccaacctggaggtcagacttgaaggagacggcgacgctgccttcgccccattcacaatatacaaccttcgatgggccacctccccagtgaggcttcatcaagggggcttggtcaacttcctttttgtgtgaacgaaaacatacgtttccaggcgcctattaagggcttgagtctgtgtcagagacgagccacacaagtcaacggacctcacagtctaatgtggagggcacacctctgactattcaaaagtcatatatagcatattaaccgtagattttaacaaattagccttgaaatacctgcagtttgtcacaatggaaggctcacttctcactgggtgacacgtccatatgggggcccccggttggcagttggagctcctccatcaggtgactcaggtgcccagattcttccaactttggggtccaacctcccctagaaccttggagtgctctgttaccagtgaggggaaagaggaagagagagtggaa[221 bp omitted]ggtgaaaccccatctctactaaaaatacaaaaaaattagccgggcatggtggcgggcacctgtagtcccagctacttgggaggctgaggcaggagaatggcgtgaacctgggaggcggagcttgcagtgagccaagatcgtgccactgcactccagcctggacgacagagcgagactccatctcaaaaaaaaaaaaaaaaaaagaggtggagaccatcctggccaacatggtgaaaccccgtctctgctaaaaatacaaaactaagctgggtgtggtggtgcacacctgtagtcccagctacttggaaggctgaggcatgagaatcacttgaacctgggagacagaggttgtagtgagccgagatcgagccactgcaccccagcctggggacagagcaagactccgtctcagaaaaaaaaaaaaatcctacgaccttgtgtgaaaaggggactcaaccctcagagctaactccagggaagccacctgcagtgtggagtggaattggggctgaggactgacgagctggcgacaggaagagcagctgggggagacgtggacggaggagacagcttctgtgaaagccctaatcaggagacaatttttcctgttgtaagttgagtggactccagatggaaaaataatacgaagaatatgtgtactgattgagcaggagtctctaaaaggccaaataaagttttggtattttaccctcaagagagtgggacaggttttgagcataagtatggcatcatcatatttttgtctaaaatgtatctgtaagaccacttcctgaagtcagaattgcacgaagcaaaaacagtaagaggtaacgttttctgagcatttactttatgccagacactgccctgagtccccagtatggatagtttacttaattttcccaacaactttggaaaggtgttttcatcactagactcattttaatgatgagaacactgaactcagaggttaattagtttgattagtgtcatgtattaacatgcataatttcatggaaggaactggatttcaacccaggaagaaagtatgtccttacctattattattattattattattattattattattattattattattgagacagagtcttgctctgtcacccaggctggagttcagtggcatgatctcggctcactgcaacctccgcctcccaggttcaagcaattctccttgtctcagcctcctgagtagctgggactacaggcgcccaccaccacgcctggctaacttttgtatttttagtagagacgaggtttcaccatgttgaccaggctgatctgcatctcctgacctcatgatccacccacctcggcctcccaaaatgctggaattacaggcgtgagccaccgcacccggccgtccttacctattattgatatatcattgtatttcttaaagaaaacaagaaaaaccaagtgtggatagaccagttaaaaagttcttgccttccaggacagtgatgatttgtttgcactggaattatcacagcaggaatttcagtaaatatgtggatttatgactgggaggtaggctcagaagaaatgctgatggaagtttggcttccagaaatatctgactaggttgttttagactaaacttctcaccgttaattaaaaaaaaaaaaaaaaaaaactttaggccaggcgcggtggctcacgcctgtaatcccatcaccttgggaggccgaggcaggcagatcatgaggtcaagagatcgagaccatcctggccaacatggtgaaaccccttctctactaaaaatacaaaaattagccaggcgtgttggtgggttcctgtagtcccagctaccctggaggctgaggcaggagaatcgcttgaacccgggaggtggagattgtagtgagccgagatcgcgccactgcactccagcctgggcaacagagtgagactccgtctcaaaaacaaaaaaaaaacaaaaaaaacaacaacaactgtaaaagatgaacaaaaaccaaagaacatctgtctgtagaacttggcatgcttccaaggcagagagaatttagggttccaagacataaaagaggaaggaaaccaagcaaggggactttatcctttgaggttagttttatgttaacggtttgctgattctgaaactaaaggcagcagatgagagaccaaaaagctgagtaggagcaggatgaagaatttcaacaaagaactagcaaatataagaacaaacacagccggacgcggtggctcacacctgtaatcccaatactttgggaggccaaggcgggtggatcacctgagcttgggggtttgagatcagcctgaccaacagggagaaaccccatctctactaaaaatacaaaattagccggactcagtggcgcatgcctgtaatcccagctactcaggaggctgaggcgggagaatcgcttgaacccaggaggcggaggttgcagtgaaccgagatggtgccactacactccagcctgggtgacagagtgagattccatctcaaaaaagaaaaagaaaaaaaaagaaaatacgggacatggtgaaaatacttaacatatgtacaactggaatcccataaggggaagaaagacagagaaagagaaaggcagacacgatattggaagggttactgaacaatatttcctaaaatgaatcaaaaacatcaagccacacagtagatgtccagtaggaacttaaacctcacgtgtttataacatgttataatataagttgcttatattcactcccaaatctcctcctcctaaggtctttcccatctcagtaaatgagaattccagccactagttatttgggcaaaaaaaaaaaataagtgttacccttgactccatgtttttcctcatatcccacagctgtgagtacattatcagacatttccctttgaaatatctccagaatagtatcatttctctccacctcttggagaccacccgagcctgaaccactgtctgctgtacctggatcattgcaagagcttcctaactaatccttcttgcatctaacattcctcctctattaatctgttctccacacagtagcagagttgtcttgtaagaagataacgattctcccaaggatcacagccaatcagacacagcaatggctgctccaagccacagggatgcctgctcatgcaccgtgccagccaagctcgtttctggagttttgggtgggtccggatgagagaagacaatagctaactttatggctgtcattctgggaaatcattcccttgagaacagagctttgtcaaaagaaggtggattctacaaaagattaagcagtaaatgactcaaaagatgatcaggcaatgggggaaaattagccaagagctgattcctatgaaatgttttattattcctgtgaaatttttgcattaatcaagaccatgaatttggaaggagcccttcttggagaagacctcttcattggaagcaatggtccctgtacaggtggctgagaggaacacaacaaaagcaacgtccaggtagagcaggaaggatgcccctcaggagcaaggagtggtcatcaggtgaaacccaaggtgtcttcttagagagtgaaggtcccgggtacctgccgccaggtcctagtgaccagcccccagagtggaagtacaagggtaatgcccagctactcacaccggggggtgatgtcctggagaaagggctgacagcagcttacctggactgctggcatcattatcacatgcatgccacatgccttcatgaaaatcaaagtctccctccaaagtgcaagtccaattccataaaataaggcatgctgatcataaaatacgatttggcaataaaatggcagtatagcaaaagcactggccactttgtgtcactccttagtatggtttggatctgtgtccccaccaaatctcatgtcgaattgtcatctccagtgttggaggtggggactggtgggaggtgattggctcatgggggtggctcctgcatgaatggtggggactggtgggaggtgactggctcatgggggtggctcctgcatgaatggtggggactggtgggaggtgattggctcatgggggtggctcctgcgtgaatggtggggactggtgggaggtgattggctcatgggggtggctcctgcgtgaatggtggggactggtgggaggtgactggctcatgggggtggctccggtatgaatggtggggactggtgggaggtgattggctcatgggggtggctccagcatgaatggtttgtcaccatccccttcggtgctgttctcacgatagtgagtgagtcctcattagatgtggttgtttaaaagtgtatggcacctctcttctctctctctctctccctcctgctccagccatgtaaagtgtttgctcctcctttgccttccaccatgactgaaagcctcctgaggcctccccagaagccaagcagaagccactgtgcttcctgtacagcttgcagaaccatgagccaattaaacttcttttctttgtaagtttcccagtgccaggtatttctttacagcaatacaagaacggactaatacagaaaattggcacccaggatggactaatacactcttatgcccaaaagcgttccagaacttcccaccaaggtcatattgacaagactttgcatcttctctcccccacccacctcttggcttagcactctgattgtatctcctcccactttccccttcgtgaccctgatccagccacatggacatccttgctgttcctagaatacaccaagcatgcatctgcctcaggacctttgcatgtgccatgctttctgcctggaacactcttcccccagagatgcatggggctcactctctgcctccttcactcttgactccaatattcccttctccttcaggtcttcttggaccatcctatctaaagttgcaacactccctccagatttcatatcacctctcactgcctttttttctttcttcagcatatatcactaatcttgcatatattttatttattaatattgtttatgatctgcccccccattagaatatatctccatgaagtcatagatgttttttctgcagtgtttcctatagtgtccctgcacctaggacagtccctggcacacaatagatactcaataaatttttttgaatgaatatttgttgagtatctaaaatctctaaacttatgaatgaatagacatatacagtatataggaagtataaggaaggctacaagggcatgattactgagtacaattctagaagccagatctctagcttttaattatggttgtaccagttataagctttgtgactttagagtaagtttattaacct[146 bp omitted]cccgtctgtactaaaaatacaaaaaattagccgggcgtggttgcgcaagcctgtagttccagctactcgggaggc[137 bp omitted]cagaactcataaaatttttgtgactattcggtgagttattatgttaaaagtaatcagataggctgaggcaggagaatcgcttgaacccgggaggcagaggttgcagtgagctgagatcacgccactgcactccagcctgggtgacagagcaagactccgtcaaaaaaaaaaaaaaaaaaaaaaaattacgtaacggatacaatgtatgtcactgggttagtggatccctgaaagccctaacttcatcattctggaatctatccatgcaacaaagttacactcgtaccccataaacgtatacaaataaaaaataatcggctgcgcatggtggtttacagctgtaatcccagcactttgggaggctgaggagggcggatcacctgaggtcgggggtttgagaccagcctgaccaacagggagaaaccctgcctctactaaaaatacaaaattagctgggcgtggtagcacatgcctgtaatcccagctactcaggaggctgaggcaggagaatcgcttgaacccgggaggcagaggttgcagtgagcagagatcaaaccattgcactccagcctgggcaacgagagcaaaactccatctcaaaaaataatcataatcataatcataaatataaggcaaaagtaagcatgctttctttaaaaaaagtagtcagactgagcctgtcatctggtaagagctctaacgtttatcgttaatatgattgttattgtcgctgttatattttcattattggtgttgtcattatatgtacaaaacagcatcagcagagaatccacatccttttcaagaacaaatgaagcatttacaaaaattgatgacttattaatccacccaggaagtctcaaaatcttccaaaaacttcatataatacaaaccatgactgggcacagtggctcatgcctgtaatcccagcactttgggagaccgaggagggcggatcacctgaggtcaggagttcgagaccagcctggccaacatggcaaaaccccgtctctactaaaaacacaaaattagccgggcgtagtggtgcatgcctgtaatcccagctacttgggaggctgaggcaggagaattgcttgaactcgggaggtggaggttgcagtgagccgagattgtgccattgcgctccagcctgggcaacaagagcaaaacttcgtctcaaaaaaaaaaaaaaaaaaaaaaaaaaaaagaaaaaagaaaagaaaagaaaaagaaaagaaaaaaaagaaatacagaccatattctgtgactacaaatttatgtaaaagattaaatattaaaagatttaaaaatacatttttaaaactaaaaattcagtacaacttatgagttcagacttaaaaaacacaggagacataaaatatttagaaatgagcagagacagtgattcatatcgaaacttgctgaatgcaataaaagtcctacttaggggaaaatgtacactttttttttttttttagaaaacacgaagtttgggaaattacttactgagcatgcaacttgtggagctggaaggagaaaggaagtcaaggggaggtgcaggaagggtccagaaaagcagcaaacacaaggttaacagaagaaatgccccagtaagtgcccaaggaactcacccaggtgcattgtcacgacgctttcagaaacaaaagaaaaagaaaataaacatattctaggtgagagaaaacagacaactgtgcactaagtttctattttttttttttttttttttttttttttga[134 bp omitted]cac[184 bp omitted]tctggaagttgacaagggagaaatgcgtttgaaaatagcctgtggccgggtgcagtggctcacggctgtaatcccagcacgttgggaggccgaggcgggcagatcacaaggtcagtagttccagaccagcctggccagcatggtgaaaccctgtctctattaaaaatacaaaaaaattagccaggcatgtctgtagtcccagccactccagaagctgaggcaggagaactgcttgaacccgggaggtggaggttggagtgaactgagattgcaccactgtacttcagccc[223 bp omitted]gagg[138 bp omitted]gggagggagggagggagggaggaaggaaggaaggaatgaaggaaggaaggaaggaagaaaatagcctatgtattcctatggagagatcccagagtgtattcttagagattaaacgacatcaggatgtcatctgtattgtgccaagaattgggggaatcagaatatacattcatattgactcatattcacccagaaacaaacactggaaggattaatatgagaaagttaaaattgtggctctcccacgttttcttccccgtccaccacctgaacaagctgcggtcctagaaatcacctcgactgctcctctttctcaccctctccccttgttctacctccagaatctgtcctcatgcagacactgcttgccagcaccacggcgccaggttcaccctctctcccctcgtccagggaacattccctaagtggtgtctctgtgttcatttgctgcttcttagctgttctcctcattgtagccagggtgatgttttcaaagggtcagtcaaatcatgtctcgctaccattgaaatctccagtgattcatgatgtacttcgcccaaaacccaaactctgtgacctacgggacactcactcacctctccagtttcatgttggtccctgtgcccctcactccctgccctcaggccacatgacattcctgctgttccttgaagacaccaggtccctccctgccttgggactctgcgtctctgcctgggtgcaccgacctcctgctttgcaccacagcctccaggtctctgctcagcatcatcttagcaagaagggccttctcagatcactctgttgaaagaagtccactcccctgacacccatccctttgctaagaagatttgtcttcattctctcttgacgttcatcctcctttctaattatctactctttgacttgtacgctgtccctctctccccattagaatggagacttcacttggccagggaccttgtctgtcttgatcatcactctatcaccggtacttagggcctggcacataatagatgctcagcaaatacttgtagaacgaatagtgaatcagaaacaatattggccattgtttactggacatttaaaggttaaataatggcacccctatgcaatgaaatactggattagcattaaaaatgatgctgctggccgggcacggcggctcatgcctgtaatcccagcactttgggaggccaaggcgggcggatcacctgaggtcaggagtttgagaccagcctgaccaacaggatgaaacctcatctccactaaaaataaaaaaaatagcttggcatggtggcgcacacctgtaatcccagctactcaggaggccgaggcaggagaatcacttgagcctgggaggcggaggttgcagtgagctgagatcgtgccactgcactccgggctgccccacacagcgaaactctgtctcaaagaaaaaaaaaaaaaaaggatgatgttgttttacttttattgacatgaaagatgtcaagggtattgttgagtgaacaaaacaggaaaaacacatgtatgtagaagttacatacattaagttatatatgtacatttacacacatgtttatggaaggagagatttctgagaaagtgttaacagaaatgtttgctgtgattaacatgaggtaatgagggtttcaaattctc[136 bp omitted]ctgcctcggcctcccaagtagctgggaccacaggcgcccgccaccacgccaggctaattttttgtatttttagtagagatggggtttcaccgtgttgaccgggatggtctcaatctcctgaccttgtgatccaccagccttggcctcccaaaatgctgggattacaggcatgagccaccgcgcctggtccctggactttttttttttaaagaaagggtcctgctcttgtcacccaggctgaagtgcaggacgcgatcgtagctcactgcactctcaacctcgcagggctcaggtcaacctcccaactcagcctcccgagtagctgggacttcagaagcgtgccacgcacacccggctaatttttgtattttgtatctaactcctgggctcaagcgatccgcctgcctctgtctcccaaaatgcttggattacaggtgtgagccaccatgcctgggtgaatttttttttttttttgagatggagtttcactcttgttgcccaggctggagtgcaatggtgcaatctcggctcgccaccacctccgcctgccgggttcaagtgattctcctgcctcagcctcctgagtagctgggattagaggcatacgccaccacgcccagctaattttgtatttttagtagagacagggtttccccatgttggtcaggctggtctcaaactcccgacctcaggcgatctgcccacctcagcctcccaaagtgctgggattataggggtgagccaccgtgctggccgaatttttttacattaagcatgtgtcagtcgtaactaggaaaaacaaaattatttttgtttaagaagataaaataaaatggccacctatgaggagctgggagtacaggcttaggtggaaacagataaggtgtcaagacctccttctgtgactgaccccttcagattttctccctagagtttcagtcatgcaagatgaggaggtctcagagcctcctgtgcggtgtagtgccagcaggtaacaatacagtattgtgtgcttacacatttgctgagaagatagatcttttgttaagtgctcttatcatcacaaattgatatgtggccataaaaatagtatcaaacaataataatatacaaatagacgggaggaacctgtgagaggtggtggatgggtttatgtcgtaaactgtggtgttgacacacagggcatactcatctccaaactcatcaagtcgtatatgttaaatacatactgctttttatatgtcaattattcctcgatagagtaaggtttttttttttttgtaattgcaagtgtctgcagagagcttctataggtttgggggtccgggagactcccataggtgtgccccgtgagcctcagcacctagggtgtgtgtagtggctattctgcctttatctgtattaaattttttaaaaattattttcccaggcattccacgacgctcaacttttcacccaagttcaagttcctgtttttttcttcacagaagtcgattgtgggcgccagttcccacattgctctcatcctaagtagcagcaacttgcgggctgatgcctgtgtccagccctagaagagcctccgtacctagaagaaaacctcccctcctgggagtcacggcgcaaggctgggctcccatcctcgcagggaggggcggatgcacctgcccctgcagatctgcgcccagatctgtgttatccacacccacatctgcgtctgcaggaagaggctccgcagcaggcaacagcttccatctgcgagcctcatttaatccccacgaggatcctgtagagggttcctatgttcacctctgttttatatatagacgaggacgctggctctgggaggagtaaagccgtgcagcagtaactcccgtgcagcagtaactcccgtgcagcagtaactgcagccgtgcagagtaaactcccagcacagaacccggcctccccggttcagaaacaaaagtgagctccctcctccctgcttgcgggcgaaactctcgctgcctgttgaacgtctccacctggatgccacggcttccccagactcccagtgcccccgggcaacgccttcctctctccccacctttccaaattttctctgcagcaagtttccctcctccaagtttctcccccttctccagccttcacgttcagtcccgtgtctctgtgccgtacaggactcagctgccataacagcagctggcgtctcagcgcccccggaagctgagactttccaggacaagaactgctttggagtcctctcgggccccagcacgacctgctacactgcaaactactgcaaagaacctttcaagactggagagatggagcaccccaagtctgttttacagatggaaaggtggtggctcaaagacgagataccacaataacagtggctatgaagctctcgctttgtcaagatacagttcaaagcactgggcatgcactgactcatctcacgacccctaaaacactcacgttggatactattgctactcctcttaccaacgcagaaacagcgtcacagcaaagttaagcagcttgcccaaagatcctccgctaggaagggaagaaggtggcctttgaacttgagctccccatccacagtctgcagtccttcagactggagcacattgtagaaattaacaatgtcatcccaacaacccttataaaacacttttgggccgggcgcggtggctcacgcctgtcatcccagcacttcggaaggccgaggcaggtggatcacctgaggtgagttcgagaccagccttaccaacaaggtgaaaccctgtccctactaaaaatacaaaaattagccgggcgtggtggctggcgcctgtagtcccagctactcgggaggctaaggcaggagaattccttgaacccgcgaggtggaggttgcagtgagccgagatcgtgccactgcactccagcctgggcgatggagcgagactccatctcaaaaacaaaacaaaacaaaacaaaaaacacttttgagttctgactttatttcttgctgttttcttatttttcatggaactcatcttaatgatttcacgtttaccaatcacgtatatttggacgtgattacagggccacagggcaacctccagaagcatgattcctttcctaagaatgaggaaggatgtggtcagtgtgttcctaaaattatgatactgctttgtaagataacatgttttgttcgttttatttcatctttttattttgaaacagagtctcactctgtcacccagcctggagtgcagtggagcaatctcaattcactgcagcctctgcctcctgggctcaagccatcctctcaccttggccccccaagtagctgggactataggcacacatcaccatacccagttaatttttgtattttttgtagagctagggtttcaccatgttg[133 bp omitted]tatgaagtgtttctctctttatttagatctttaatttccctcagcaatcttttgtagttcttagtgtacacatcttgcatttctttattaaattggtttctattcattttattatttttgaggctttgtaaataaaattgctctcctaatttcattattgaattatttttgtcagtatatagacatatgattgattttagtgaatatgtcttcatcgtgctaggatttttgttgttgttgctgctgttgttgttattgttgagacagagtttcgctcttgttgcccaggctggagtgcaatggcgcaatctcggctcactgcaacctccacctcccgagttcaagcaattctcctgcctca[134 bp omitted]cagtctcccaaaatgctgggattacaggcatgagccaccacatccggctcttgctagaaatttattgtacttttcagcttcataatttccatttagttttatgctttaataatatcccaaggtaacattatggtcactttctgtaactaatatttcttactctgttgatttatcaggggctggattactctccttcaagtttcctgtgctagcctaatggtttggatgttgttgttcaatgcaattctcctttatttttgttccatttatttttagcagctttgtttagctataattgttctactaaaaaaccttctcacttaatgtacacaatcagatgaatttggacacatgcaataaccccttggaagacattcacgtgcatgcgttgttggtttttccgcttcttacgggaactcctttcaggcatttccatctccacgctacacatggggaaatagaggctcacagaggagaaaggacgtggttcaggtcacacctgtccctggtcctccaggctgaggagcagagagaccacccaccttagtgctggaagggtttaacacatagcttgggctccctcttgtggccacagtggagaaactccctgcttagttcatttttattttttccatctggcattcatttttttcattcagtaagtatttgttggtcctgtcctgtgtgccagacactgtttgaggctctagaggtccaccaatatagaaaacaaacaccctttccatggaagagcttatattcttgcagaaggagaggggcagtaacccacaggcattatacagtcacagtcagctagaaggtgagagtgatttggataaatgagaaagtgcagcggtggtccagggggtctggagggtgcaaagctcagcagggggaatagtgtggcagttgcagacagaggggtaggaagagggaagtggcaggaagagaatgcagaggggtgagggttggggccacaggtcctgtgtagagccctgttggtcaccatgatcaccctgagtgagctgggaagtaacacaaatgactccaaatagaagcgccttcatggagccttcttcttcccagacttcaactagaaacctgagctgcctgtcacagcaggggacgtgtcatcccattagacttcaaacgtcctcagcaattccctgcccccttctttctaggagtcaggattcctcagccttgctctagaactgcatctggtgacccctagaaacctgtcctggaagccttacaaggctcttcacactcacagtttgtgatatgaccccagagttgtgcagtgcacaacctacacagctggacacgatgggcctggcactcttcctctgtgctcccactgcactctgtgctgactatgtcattccactgggtggtgccatgtcaacttctctcctctcctctcaatatcctgtaaggataagataggatcaaagttctacccacgtccctggtactcagaagaggagctgaaacattggcgaccactcattagcactctacttaacaaaacaaattgcccaggtagttatgattagatttctataaaaggctgaataattacagaaaggctctagaaactagtgtataattatgtacaggcgctggcagtgtgtagagtcatggaaatcagctaaggaatcgcggtgcagtctcaggaaccagctggataattgcaccaggagctcccaaaaccagctggataattatagtggagtccctggaactcagcgggtaattaccatgtactcatggaatcagcagtaataatagaagggtcccaaatgcagacactagggaaagtctggagacacttttgattgtcacaacccagaggagagggggatgcttctgggtggtggggggtggaggcgggggatgcacaggacagctcctcccccaaggaataacctagccccgaaagtcaacagtgttacccagaaaaaaacagggttcctttgcctggtgaggagcaaacaactctcccgagaatgcaggtgatgtggtttggctctgtgtccccacccaaatctcacctggtattgtaatgatccccacgtgtcgatggggggcagtgactcacgcctgtaatccaagcactttgggaggttgaggcaggcagatcatgaggtcagaagatcgagaccatcctggataacacagtgaaacccgtctctactaaaaatacaaaaaattagccgagcgtggtggcgggcagctgtagtcccagctactcgggaggctgaggcaggagaattacttgaacctgggaggtggaggttgcagtgagctgagatcacgccgttgcactccagcctgggtgacagagcgagactccgtctcaaaataataataataataatccccacgtgtcatgggagggacctgtgggaggcgactgaatcacgggagcaggtttttcccattctgttctcgtgatagtgaataagtctcacgagatctgatggttttataaatgggagcgcccctgcacgctctttcttgcctgctgccatgtaagacgtgactttgctcctccttcatcttccgccatgattgttagccctccccagccaagtggaactatgagcccattaaacttctttcctttgtaaatgaaccagtctcgggtatgtctttattagcagcatgagaacaaactaatacagaggttttgatcaagaagagttttatgacttgacacagctaaggaaggcactgggtgtattcttcaaagcagtgtctccctgaggaaaagggacaggagggctctatggggtgagggagcagggagagggcgcgtcgttgtatgtggaggagggtcccagtcacgcagatgcagcgagtcgtcataccagcacacgggtcgcatgttacggtaacgagactacagctcctcccgggatggagacttgagcgcagcagtgcagaaagttcactcgggttcatctctaagttgccagggcccgtcagaggctggttccaaccaacgagtggccgcattccacacagggtttggagaaaaacaggctgcagggcagaaggctgtgaaacaggctgattgctcaagttgattaaattcctataatccctggagaccctccctgtctccatacagta[184 bp omitted]gtggtggcgggcgcctgcagtcccagctactggggaggctgaggcaggagaatggtgtgaacccgggaggtggagcttgcagtgagctgagatcgcgccactgcaccccagcctgggcgacagagcgagactccgtctcaaaaaaaataaaataaaataagaataagaagaagaaagaagaaagaagaagaagaggaagaggaagaggaagaagaggaagaggaggaagaggaagaaaaatgttttaaaaagactatttttagagcaggttcaggttcatagtaaaatgaggggaaggtagagattttccatgtactccctacgccgacacctacatagcttcccccattaccagcgttccctaccagagcggtatttttattacaactgatgagcctgcattgacacattgtaatcacccaaagtcatattagggctcgctcagtcttcctgttgcacatcctatgagttcaggcaaatgtctaatggcaggcacccaccgtcacagtgttagacagaggagagccattgccctaaaattcctctgtgcaccacctattcatccttccttcgcccaacccctggcagctctgatcttttcctgtctccatactttgccttttccagaatgtcatattgttggaatcagacaatgcgtagccttttcagatgggattctaccacttggtaatatgcatttaaggttcctctgtgtcttttcatggcttgagagctcatttctatctatctatctatttatttatttatttatttatttacttatttacttatttatttatttttgagatagagtctcgctctgctgcccaggctggagtgcggtggctgtgatctcggctcactgcaagctccgtctcccaggttcaagcgattctcctgcctcagcctcccgagcagctgggattataggcacctgcccccacgcccggctaatttttgtatttttagtagatggggtttcaccatgttggtcaggctggtctcgaactcctgactttagatgatccacccgcctcgatctcccaaagtgctgggattataggcgtgagccaccatgcctggcatcatttctttttcttttcttttcttttctttttttttttttttttgttgttgttgttgttgttgttgaggcaaagtttcactcttgtcgcccaggctggagtgcagtggcacgatctcagctccctgcaacttccgcctcccggtttcaagtgattttcctgcctcagcctcccaagtagctgggattacaggcgcctgccaccacgcctggttaatttttgtatttttagtagagatgggtttccccatgttggccaggctggtcttgaactcctgaccctgtgatctgtgggccttggcctcccaaagtgctgggattacagatgtgagccaccgtgactggctaatttttgtgtttttagtagagatggggtttcgccatgttggctaggctggtctcgaactcctgaccttgtgatccgcccgcttcggcctcccaaagtgctgggattacaggcatgagccactagagtctctttgtgaaaaggaatggaaggatgtggtgtgat[139 bp omitted]catggcgaaaccccatctctactaaaaatacaaaaaattagccgggcgtggtggcaggcacctgtagtcccagccactcgggaggctgaggcaggagaatagtttgaacccgggaggcggaacttgcagtgagccgagattgctgcactccagcctgagcgacagagcgagactctgtctcaaaacaaaacaaaaaaagcttaccctccatgatgcagcaatcccactactgggtatatgctcaaagaaactgaaaccagtgtgtggaagagatgtctgcacccctatgtgtattgcagagttattcacaatagccaacatatggaatcacctaagtctccatcagtggacaatgggtaaaggaaatgtatatatacacagtggaaatactatccagccttagaaaggaaggaaaccctgtcatttacagtatggatgtaattgtcaaccttcaggacatcatgccacatgaaataagccagatacagaaagacaaatatcgcacaacctcacttatacatggaatattaaaaagttgaactcaggccttcgagactagccatggccaacatggcaaaacctactcgggaggctgggcacggtggctcacgcctgtcagcactttgggagaccaaggcgggcagatcacctgaggttgggagttcgagaccagcctgaccaatatggagaaaccccgtctctactaaaaattcaaaattagccaggcgtggtggtgcatgcctgtaatcccagctactcgggaggctgagg[166 bp omitted]aaggggagtagggattgggaagatcgtggtcagagggtacacaattttagatagaaaaaaataaattcaagagatctgttgtgcaacatggtgacaaattagtgaaaatgtattatgtacttaaacattgttagcagaatagatcgtaagggctctcgccacacacgcaaaaatgacaactatgtggccacgaacggtggctcacacctataatccaagcactttgggaggctgaggcaagtggatcacttgaggtcagcagtttgagaccagcctgggcaacatggccaaaccccatctctacaaaaaatacaaaaattagccagacgtggtggcacacacctgtaatcccagctactcgggaggctgaggcacaagaatcacttgacgtgggaggtggagtttgccgtgagctgagatcgcaccactgcactctaggctgagtgacagaatgagactctgtctcagaaaaaaaagtgaggtgatggatatgttaaacatcttgattatggtaattatttcacaatgtgtacatatgtc[139 bp omitted]cctcagcctcccgagtagctgggactacaggcgcccggctaatttttgtatttttttttttagtagagacggggtttcaccgtgttagccaggatggtctcgatctcctgaccttgtgatccacccgcctcggcctcccaaaatgctgggattacaggcatgagccaccgcgcctgaccaaatatatacgcttttatttgtcaatcatatctcaattaagccaggaaaaaattggtaaggctacttttggaaacactttgacactatttcaaaaaattgaaactaacaatccctatagcgcaatcattccattcttatatgtatactctttaaaaattcttgcacatatgcaccaagaaacatgtaaaaaatgtctgttacgtaatagggaaagtaaaataaatagaaatagaaaagtaactaaaataaaagaagcccatgtgttcatcaacaggtacaaaaatacaaaaactgtgatatagacctatattggaaagcttcaaactatggcattgaaaatgatttcacgaatcatttcaaaaaaaaattcatggtttctgttgtcatttttaccaagttcattccaatatgtggtttagagacactattttaaacaaataaggggccaggtgcagtggctcacgcctataatcccagcactttgggaggctgaggcgggcagatcacctgaggtcaggagtttgagaccagcctggacaacatggtgaaaccccgtctctactgaaaatacaagaattagccaggcatggtggtgcgcgcctgtaatcccagctcttcgggaggctgaggcaggagaattacttgaacctgggaggcagagtttgcagtgagccgagatcattccaccgcactccagcctgggcaacagtgtgagactctgtctcagaacttaaagtagaataaaataaaataataaaataaaacaaataagggaacgacaagcacagttacttctgcagaggaggaaagtggaggatgagaatggaaggagattccaggtagatgaggtggtcgggatgagattgtagctcttaattggatggtgggctaagtgaggccgtttcgttaatgtttcatgattcaagctgttttataaattctcttttatttatgaaaaatacataatacatgtttggtaaagtgatcaaactttcttgatcaagatatcaaaagaaagacccaagattttattttctatttctttctttttctttttttgagacggagtctcaccctgtcacccaggctggagtgcagtggctcgatctcagctcactgtaagctccacctcccgggttcacgccattctcctgcctcagcctcctgagtagctgggactacaggcacccgccaccacgcctggctaattttttg[132 bp omitted]atcagttagctattgctgtgtaacaaatcacctcaaagggagcagcttcagacaacacacgtttattgtcttgcgatttccgtgaatcagggatctgagcacagcccggctgggtcttcagcttcagggtctctcccgggctgcaatcaaggggccagcagctttgtggccatctcaaggttctgttgatttcatggtgttgctggcagttcagttctttgctgactcttggccagaagccacccctcagttccttgccatgaaagttttctgcaacaggatagctttgtttcatcaaagtatgcaaactaagcaggcaaaaagagtctgctaacagaatgcaagtcacacaatcatccttaaaaggacgggattacatgatgctataaataccaggaggtgaggattattggggaccatctgggaggctgcctaccacaccgcacaaggcaaaccttatgaatatgtatggattatataggttgctttcaggcttccaccaaaaataggattgccttacagctctaccagcctaggacccaccccagcaggtgtggcttgcttgttttaagggagcagagacagagggttccttatatcccacagccaagcccttacaggcacagcagggcagctgcttaaggtggagagggagtctaaccggttttcttaccatgcttagggcagaaaacataatctctattttgccatgtaagactcaccactgagcagtccctctctttcctctgtattacactgacacttcacataaacctctaaacctcatataacctctaagcagagataggcttcataaaggaatttagccagaatgccacattatttttccttgttgcagagagtagcatctatcttatgggaagagtcatagaa[181 bp omitted]gtgttggcggttgcctgtagtctcagctactcaggaggctgaggcaggagaatggcgtgaactcgggaggtggagcttgcagtgagcggagatcacaccactgcgctccagcctgggccacagagcgagactccatctcaaaaaaacaacaaaaaaaaaaaagaaaagaaaatggtcaggccgggcgtggtggctcatgcctataatcccagcactttaggaggc[137 bp omitted]tcaggcaggagaatagctaaaacctgagaggtggagattgcagtgagccgagaccgcaccactgtactccagcctgaacaacagagggagaccccatttcaaaaaaaaaaaaaaaaaaaggccgggtgcggtggctcacgcctgtaatcctagcactttgggaggccaaggcgggcggatcacctgaggtcgggagttcgagaccagcctgaccaacacggagaaaccccgtctctactaaaaaatacaaaattagctaggcgtggtggcgcatgcctgtaatcccagctactcgggaggctgaggcaggagaatcgcttgaacccgggaggcagaggctgcagtgagctgaggtcgagccactgcattccagcctgggcgacagagcaaaactccatctcaaaaaaaaaaaaaaaaaaaaaaggctgggcgcggtgactcacgtctgtaatcctagcactttcggaggccgaggttggtggatcatgaggtcaggagatcaagaccatcctggccaacatgatgcaaacccatctctactaaaaatacaaaaattaactgggtgtggtggcgcatgcctgtaatcccagctacttgggaggctgaggcaggagaatcacttgaaccagggagtcagaggttgcagtgacgggagatctcaccactgcactccagcctgggcaacacagccagactccatctctttaaaaaaaaaaaaggcccacattgggccgtgtgatgggggatcccactctccacctcaaaggatagaatggattccacctttccctccacagaggaaggcagaaccagacttcccactaagactcagactgacagggacctctttccaagtagcaaaaaggttcatacacggaaagcggaaaatgacaaattatgacttgccacggtgcatagcagccaaggtggttcccaaaataaaacctcttcccacacactttgtgccaggtgccccacgtcttttttttttttttttttttttttttttgtaattaaaggagatcgacaaatctggggtgagaaggttggtagaggatgagtttttccttcaacatcttattataaaaatttttcaagcatagagaagagttgaaagaatcttagaatgaataccccatccacaccacccagacacccagactcaaccattcacaactttttttctttttcgagacagagtcctgctctgtcgcccaggctagagtgcagtggcatgatcttgactcactgcaacctctgcctcccaggttcaagcgattctcctgcctcagcctcccacatagctgggattgcaggtgtctgccaccatgcccagctaaatttttttttttatttttagtagaaacggggtttcatgatgttggccaggctagtttcaaactcctgacctcaagtgatctgcccgcctcggcctcccaaagtgctgggattccaggcatgagccaacatgcccagctaatttttgtatttttagtagaaacagggtttcattatgttgaccaggctggtcttgaactcttgacctattgatctgcccgcctcagcctcccaaagtgctgggattttcaggtgtgagccaccacacccggctgttgcacacatcttaagtacaccattaactgtgtgggtttttttgtttgttttatttatttattatttatttatttattgagccagagtctcgctctgtcaccaggctggagtgcagtggcacgatcttggctcaagcgattctcgggttcaagcaattctcctgcctcagtctcccaagcagttgggactacaggtgcctgtcaccacgcctggctaatttttgtatttttagtagagacagggttccaccatgttggccaaaattgtctcgatctcttgacctcatgatcctcctgcctcggcctcccaaagtactgggattacaggcgtgagccaccgttcccggcctaagcgtgttttaaaattatatactgaagcccctatggagacatagaatatggccattgtcacagcaagctcccaaatgcacctgcccagtcacatcttgcctttactcccctggaggctaccactcttctgatattattattttttcactatagactaatttcaactgttctgggacttcacgcaagcagaatcataaactctcagaaaactgaactctcctctctggcttcttccactcagctcaaagtttctgagattcacccgtgctgctgtgtgtgtccacagtccgttcattttcactgcggggcaggattgcattgtacggggttccgtggtttatttatcctttcttccactgatgaacacctggctgtttccagtcttgggggctcttgtgaacaaagctactgttaacatttctatttatttatttatttttgagacaaagtcttgctctctcacccaggctggagtgcagtggcgcgatcttggctcactgcaacctccgcctcatggtgcaagcgattctctgcctcagcctcccgagtagctgggattacagacatttgccactgcacctggctaattttttttttttttttttttgtattttagtagagacggggtttcaccatg[139 bp omitted]tccagagcccagcccccagccacctccatttctgagctctcacactcagggctgctgtgcacctgccttcatcacccagggccaggaaccagaccactagagtaggcccaatgccccaggccctgctgaaattattcaaattagctaatcacaaacctgtttaccctgccccacccactcattcctgcaaaaaccaaatcaagctcttgccctctctccgccctcactccctctgcctctgatccctcgtgctctcccgtgtgacctgcatgctccctcggccctggtgctctctgggtgtcctgcctggcctggcatgtcccttcctcttgagaactgtgacaaactgtcttctcagtggtccatctcatctgctgggccccccatacctatgtatgaaaacatcttgaagccgggcgcggtggcttacgcctgtaatcccagcactttgggaggctgaggcaggtggatcatgaggttagtgtcacgcgagtccgtgtgaagagtccaccaaacaggctttgtgtgagcaacaaggctgtttatttcacctgggtgcaggcgggctgagtccgaaaacagagtcagtaaagggtggtgggattatcattagttcttacaggtttggggacaggcggtggagttaggagcaatgttttgcgggcagggggtggatctcacaaagtacattctcaagggtggggaaaattacaaagaaccttcttaagggtgggagagattacaaagaaccttcttaagggtggggaagattacaaagtacattgatcagtcagggtggggcaggaacaaatcacaatggtggaatatcatcagttaaggctattttcccttcttttgtggatcttcggttgcttcaggccatctggatgtatagatgcaggtcacaggggataggatggcttagcttgggcttagaggcctgacaggagttcaagagcagcctggccaagatggtgaaaccccatttctactaaaaatacaaagaattagccaggtgtggtggcatgcacctatagtcccagctactcaggaggctgaggcaggaga[145 bp omitted]ttggaaggccgaggagggcggatcacaaggtcaggagttcaaaaccagcctgatcaacatggtgaaaccctgtctatactgaaaatacaaaaattagccaggcgtggtagcgcatgcctgcagtcccagctactcaggaggctgaggcaggagaatcgcttgaacccgggaggcggaggttgcagtaagccaagatcatgccattgcactccagcctgggctacagagtgatactctgtctcaaaaaaaaaaaaaagaaagaaatacattggcgtggttcagaaaggtggaacaacacaaagggtggggcgaggcgtgcaatttaaacattttctgattgacaattggttgagttttctctgaagacccggaatcaatagaaaggaaatgttcaggttaagctaaaggatcgtggagaccaggttttattgtgcagaggaagctgacttcagagagagagggcagggtgtaaaatgcttcttacaggacctaaaagagtgcctgggccggccacggtggctcacacctgtaatcccagcaactttgggaggtcgaggcaggcggatcacctgaggtcgggagttcaaagccagcctgaccaacatggagaaaccctgtctctactaaaaaatacaaaattagctgggcgtggtggtgcatgcctgtaatctcagctagttgggaggctgaggcaggagaattgcttgaacctgggaggtggaggttgcggtaagccgagattgtgccgttgcactccagcctgggcaaaaagagtgaaactctgtctcaaaaaaaaaaaagagtgtctggctctcctgggcctggaaaggaagaagggaaaacaaaggagaaacggggttctgtaaagaatgtggatttttcccacaagagactttgcagggcaatttcaaaatatggcagagaaacatgttttggggtaaaatatttttattttcttccttgtgttgtaatgctatgccagagtcagattggaaagtaagtcacaccatagaggattaaatacaacccatctgatgagaatttatggtttgtaaggcatgactcctcaaacgccttaggtaggaatttgggcaagataaaaaaatcagagcttagttctcaggggtcatggcgggacaacaggagagagcgtctc[137 bp omitted]caaaaccccatctctactaaaaatacaaaaattacctgggtgtgatggcatgcacctgtagtcccagctactcgggaggccgaggcaggagaattgcttgaacccaggaggcggaggttgcagtgagctgagatggtgccactgcactccagccagggtgacaagagtgaaaactctgcctcaaaaaaaaaaaaaaaagaatattacagtgaaaacctagatagttatcacctggattctagtctactgttaatcttttctccttccttccttccttccttccttccttccttccttctctctctctttttccttccctttctttctttccttcctttctctctgtttctttcctttctctcccttctcttttcctctttctttctttcctttctctccctctttctttctttcctttcctttcccttcccttcccttccactcactcactccctctctctctctctctctctttcctttctttctttctttctttctctctctctccctccctccctccctccctccctctctgtctctctctctttctttctttctttctttctttctttctttctttctttctttcttctttcttaagacagggtctcgctatgttgtcccggctacagtgtagtggttattcacaggtgcaatcatacccacagagcagccttgaacttctaggctccagtgatcctcctgcaccagcctcctgagttgctgggagcacagactcatgccactgtaccttgcttaatatttatcttcctttgccttattacctatccctccatccatccgtcttattttcttttgtgattaacttcaaaaagagactgcagacaccactacactttctcccaatactaagcatgcacctcattaacatttttcagtaaaatttttatagagtggagtgcacaaatcttttttttttttttttgagatggagtttcactctttctcccaggctagagtgcagtggtgtgatagctcactacaacttccacctcctgggttcaagcgattttcctgcctcagcctcccgagtagctgggattacaggcatgcaccaccacagctggctaatttttgtatgtttagtagagacggggtttc[132 bp omitted]aatgcagacactggtacaaaacgaaccctcatcaagatacagaacgaggccctttatcccaggaagttcccccagcccccttcccagtcaccctgaccctactcacccagaggcaaccactgtttttattatttttgctaccatatgttaattctgtctgtttggaaaatcatctaactgaactcatacagtgcatcctcctttgtttctgacactcagcacaataattttgagaccgacccatattgctgcatgcattattagcttgtgccttttcattgctaagtagtattccattctgtggctatattacctatcttggtccattcccctgttgataggcatacaggatgtttctagcctgaggctattatgaataaagctgctgtaaacagtcttgcaaaattcttggtgtggataaatattttcttttcttttgggtaaaagtagaattgttggccgggcgtggtggctcacgcctgtaatcccagcagtttgggaggccgaggtgggcagatcacgtgaggtcaggagtttgagaccagcctggccaacatggtgaaaccccatctctactaaaaatacaaaaattagccaggcatggtggtgtacacctgtagtcccagctactcgggaggctgaggcagaataatcacttaaacctgggaggcagaggttgcagtgagctgagatcatgccattgcactccagcttggtgacacagtgagactccgtctaaaaaacaaacaaacaaaaaagagtagaattgttgggtcatgggataggtgtgggcttagatttgtaagaagctgccaggccttttcctacagggtttgtaccctttactctctcatcaataatggataacactcgggtgcttcattcctggaatctttggatctcaggcctgctttgggctgttggtatttcactgtggttgaatgcagctctattagtcagatttgtccaaagaaagaaaaccaaagagatatataaagagataccagcagaggtttattatgagaacttttcttacacaattctggaggctgaggagtcccacgacgtgctgtccataagctgaagaagcaggaaagctggtggtgtcattcagtctgaggctaaaggcatgaggaccaggaagtttgatgtcctagggcaagagaaaatggatgcgccagttaagaaaacacagtgaattcgcccttcctctgctttttgttctattcgagcctccagcagattggatgaggcccgcccacattggtgagggagaacttctttactcagtctactgattcaaatgctcacctcttccagaaacacccccacagacacatccagaaataatgtcttaccagctatctgggcatcccttaggccagtcaagttgacgcataaagttaaccatgacatcagcttatttaataaactggctatatctgcatatttgctcatttgcctaatgagttatctctatcatgctctgtgaaagcagagattttcatccctttagttcactgctgaattcccagggcctagaacaatgcctggcacctagtagctgtccaataaataaatacttggggaatgaacaaaccaatgaatgtatggattcttctttattattaatagatcccagggcttacttaacacagcctggcagctattaaacatgtaatcgaaagaaaggaggggaaaaggaaggaagaaggaaggtagcaatgaaggaagaaggaaggagggaagaaaggaagggagagagagaggaaggaaagaaggaagaaagggagggaggaaggaggggagggagggaggaaaggaaggaaggaaggtaaaaaggaagagagggaggaaggaggaaggaaggagaaaggaagagagggaggcagggagggagggagggaggaaggaaggggggagggagggagggaggaaggggggagggagggagggaggaaggaaggaaggccagaaggcaggaaggggtagggagggagggagggaaagaggaaagaaggaaggagggaaggaaggaagggaggcggggagggagggaaagatcataaggatgactgaacatctgaaggctgaacagctttacgtatttatgccttttccggtcattttcttatgtacttgtgaattccttcactttgctttccttctatttggcagatgtcactgtagtcatttttaaaaatcaacaactgtcaccctcgtaataattcgcgagcgcttgtcaagcactttgtcagcaaacacttcccgtgtgttcactcgatctgcacaacaaccctgtggaattggttaaggttgctctttcttgcttttttttttttttttaaacagagtttcactcttgttgcccaggctggagtgaagtggtgcgatcctggctcactgcaacctctgcctcccgaattcaagcgattctcctgcctcagcctcctgagtcgctgggatcacaggcacgtgccaccatgctcggctaattttcgttatttttagtagagactgggtttcgtcatgttggccaggctggtctcgaactcctgatctcagctgatcccccccgccttggtctctcaaagtgctgggattacaggcatgagccactgagcctggccaaggttattattttcatcctgtttatgtgaaccgaaagcacagagttgagaaaattgtctaaggtcaccgagctaataaggagctgagccagggttgaaaccagataatgtggctgcaaagcatgaactcttagtcatgccaatcatgaactaaagagcgtccttcatttgtgtctctgttcagatatcatccaaatggagaga[222 bp omitted]gaggcagataattgcttgaaccggggaggtggaggttgcagtgaaccaagatcacgtcactgcactccagcctgggcaacagagcaagactctgtctcaaaaaaaaaaaagtagtgaccacctcatccccaccacatccactcacatctatgtgttgcttcctcttacctgatagtatagactcagctcacctgttcattcctcaattttctaccttctgtactccagcggttttagttgtgccaactggagactttgtcttttttgcttatgcccatttctccagaacatgcagcagtgcctgggacatagtaggcactcaatacgtgtgtggggaacagatacatcattgaagcacagctgttagcacagcacacatggtcctgatttattgagaacctactatgtgctaggcacaggaccaagcagttggaaatctctcctggcattcttacagccactcagttaagcaggcaagtctcccaaagcttaagccgtgggaagcacatgctgagtccttcagccaggagctgtccttgccttctgtcagcagaagctggtcaggaggccttcccggaggaggcagcatcactgcctcccccaatcttccctcccatccctgtggctgctccttctcagtctcattgtgggcccctctttctccacttgtccctttcatgcctgtactactccatgtctggctagaccagagcttataaaccagccagctccaacccacagacaggttttatttggcccacacagcatttttttttcatttgaattagttttaacatttaaaagctgagggattttgcttttaaaaatatccagatttctgccttctcttggaaatttggaacatctggtggtgccaggtccctcttcccatatggcaagcgttggctgaaacgaaatagcaacagccatgttctctgagctaccctctaccagggggtttgcatgcgtcccaagccatgaatgaacacctgcagagcttgagatggtttaggggtggtattcagccaagggctctagaaatacccaagggccacctggaatgaccgtttgttttcctcagcagaaacagacccagggaaccacggccggagaaggtagagataatacatttctgtcaggcagcattgcagatgtcccatgcaggaggatggatgtcctgggtttaatcgatgcaggctaagccattctctaaagaggcttgccttctggggcccaaaacacatgtgagggagacagagaggtggggacagaaagagccagagtaaagcagagagagagagagaaagagataaagagagagagagagagacagagagagagacaaagagagacagagagagagagagaaacagagagagagagacaaagagagagagagacaaagacagagagagacagagagagacaaagagagagacagagagagaaagagagacagagagagacagagagagagacagagacaaagagatagagagagaaagagagagagacagagagagacagagagagagagacaaagacagagacagagaaacaaagagagagagagagacagagagagacagagagagacagagagagagagagacagagagagtgagagagagagagagagagtccatcaatttaaagtctttttctaggggaatgaaggggaatggcatatgtggtgactatggggtgtgtgtgtgtgtgtgtgtgtgtgtgtgtgtgtgtgtgtgtgtgtgtgtatttcatgtaagaaagcagcatgctgaggacacagcagcaagaacaaagcaatgagctccccctggaagccaatataacttacttctacttagtaacatttaccccttttcttttttaagacagagtctcactctgtcgcccaggctggagtacagtggcacaatctcagctcaccgcaacctctgcctcccaggttcaagctattctcatgccttggcctcctgagtacctgggattacaggcacacattgccatgtccagataatttttttgtatttttagtagagacagggtatttttttttttttttgagacagagtcttgctctgtcacccaggccggagtgcaatgacacaatctcggctcactgcaacctctgcctcccaggttcaagcaattctcctgtctcagcctcccgagtagctgtgactatgggagtgtgccatcacatccagctaatttttgtatttttactagagatggggcttcaccatgttggccaggctggtctcgaactcctgacctcgtgatccgcccgccttggcctcccaaagtgctgggattacaggcatgagccaccatgcctggcctgtttgtttatttttttgagttggagtcgtgctctgttgtccaggctggagagcagtggcacaatctcagttcactgcaacctccgcctcctggattcaagcaattctcttgcctcagcctcccaagtagctgggattacaggcacacaccaccatgccaggctaatttttttgtatttttagtagagacaaggtttcgccatgttggccagactggtctcgaattcctgacctcaggtgatccactggcctcggcctcccaaagtgctggaattacaggcgtgagccactgggcctggccgagacagggttttaccatgttggccaagctggtctcgaactcctgacctcaagtgatctgcccacctccacctccccaagtgctgggattacaggctcgagccactgcgcctggcccccacttaccccttttctaacaccaacccagattgttctctgcaattcaggattcatgtttctcaggtggcaatccaagatccattagccagccacaaaacaatttagaaggttgtgaccagatttgaattacaaaatagaagtaacagaggatagaaattatccaagagcattgcacatagtggtcagaaactttttacttttttttttttttttttttttgtgtgtgtgtgtatactagatcataatgtaaaatgtatttctcactgtgggttgtggccctatcagttggaaaccactcatctagaatattatccatatggagagggctgatgcagggccaaatgatggagggtataaactcagggctgagggtgtgacttgattctatgggcaacgtggagccactgagctctattgggttgcacagtcaccaccagcacctcactgtcctgcactctgatgtacacatgcccaactgtgcacatcatgacgtttggaattcttcccattagcaaatcctgctgctacaacaaacactggctgtggacatgatgcaagagattgtcagaacaagagttttagaatatactaatcttagccctaaagggttaagccttcattttacagacagaaaaagagggactctaagatgaaaaactacttgcctagagtcacttaatacacctctaaccgctcatctcgggatcttcttcatccccaagccccatgtaggccacctggttgggaatggtggagaacatgactctagccagaaccagagaaagctgaagaagacctagggtagtgatgagagagggtgtgtgtgtgtgtgtgtgtgtgtgtgtgtgtgtgtgtgtgtgagagagagagagagagacagagataaggcgcctattctcactctcccatttcatcatcaataccttcaccaatatcactatcctcctcctcaccgtcatcatcatcgtcctcatcaccatcatcaccaccatcatcatcatcattatcatcatgacatgtcaacataatcttgtcttcaccaccatcatcatcatcactatcatcatcatcatatcctcatcttcaccatcaccatcaccaccaccaccaccatcaccaccaccaccaccatcaccaccgtcaccaccatcaccatcaccaacatcatcaccaccatcaccaccatcaccagcatcatcaccaccatcaccaccatcaccaccaccaccatcaccacatcaccatcaccaccatcaccaccaccatcaccaacatcatcaccaccatcaccaccaccatcaccaacatcatcaccaccatcaccaccatcaccaacatcatcaccaccatcaccaccatcaccatcaccaacatcatcaccaccatcaccagcatcatcaccaccatcaccaccatcaccatcaccaacatcatcaccaccatcaccaccaccaccatcaccaacatcatcaccaccatcaccaacatcaccaccaccatcaccaccaccaccaccatcaccaacatcatcaccatcaccaccatcatcaccaccaccatcaccaccatcaccaccaccaccatcgccaccaccatcaccatcaccaacatcatcaccaccatcaccatcatcaccaccgtcaccaccatcaccaccaccatcatcatcataattatcatcatgacatgtcaacataatcatgtcttcaccatcatcatcatcatcaccatcaccatcatcaacaccaccaccaccatcatcatcaccatcaccaccatcaccatcatcatgacatcatatcaccaacataatcaccaccatcatcgtcatcaccaccacctccgctaccaccagcattcctcttttccctagccctttcttgccaatctggagcaaaatatggaaatgggttaagtggagaactaatctccctttcttccactcatcccaattcccacaagagaggccacgtgtgtggtttccagatggcaaagtctcaccctgccctacagcaagaggggacccctggggccagattcctgagcacctagttttggctgcaatagtgacagtctgggtgatgatgtcagggtggccaggtcccctcccagggttggcacttccccatctatcggtgtggcatcggaggattccagtgagatgtaacatggggagtggctggaaaaatactctgtaactgtatggcgaatgccaaggggcaggggtccttgtatacaccgaagtaatcccgagtcagtttacaggatgggaagggcccctatatagatgaccagggtccttatgcaggtagaaggggtccttatgcagcatgaaggcttgctacacaggcgtgtggatttttccatacattctggagtagcctctacacataggagtgtttgtgcttagaagctgtgtccttatgcaggctaggaataaaagtgggacggagattttacacaaatacgggcatcttttacaggtgggagcactttcgtacacagaggacttcttatccatggaattggccgttctttgtaaaacgctctgtacttactagcaacctttacacagacatgaagtttctccataaggataaagggatcattatgttttaggtgaaataacagtatgagtggcctcgtatggacaaggagggctgatttcaatcgcgatgcaagccagctgtccggatgccgccgacgccagcagcgcggtacctgcgcgggcagcaggtgggagccgcgaccggggtggggcgcggagcgctgggggcctcccgactcccgcagtccccgccgcgaccaccaggggcagcaccgtccccgcccggcccgcgcctccctccccccaatctccgccccccaccccctgcctcccccccgctcccgctcccctgagcccagccagaccccgcgccgcccgcgccccgctcgactccggaggctcccgcagccccggcgtccgccccgctgccccctcccccgggggccatgggggcgcccccgggctaccggccctcagcttgggtgcatctcctccaccagctgccccgcgccgacttccagctccgcccggtgcccagcgttttcgcgccccaagagcaggaataccagcaggtgggaccgggcgccagggcctgggggccagggctgggggccggagctcctgggtcccgagggagaagggggctgggtcacagatttcctgagctccgccggaggctgggggccggcccggactttggggtttcggagggaggaggagcctgggggcgcccatgcctggaggttctcctgggacgcgcgctgggggtccagacctcgagctctctaaataagggaaggctggggacctgcacccctgagttcatggagaggaggggaggggggcccggattcccgggtgtctgatacctgcctgggaagccggcctccagggtcatcgggagggtaggtctactcttcctgccctaaaagatgaccctgccccacaggatcagagcaggtgaatatgtcccagataaggtgggacccaggagacagcggacctgataacggtggcggggaaaacgctggctgctgcggtgctgggatgggattgagagtctgaaatggggaagggggcttcaggggctgaggaccagggctggaaaatgaaggggctctgggagaggaagcttcttgcccgtcccaagaaagaaggggtggtcagggcgctgcaggggtgagggccgagatgaggctgggtttggggagcctcgggatgacagacccgggtcccgagggtggggccggtgtgggaacctcacagaagccggtgtccctggggaaggggcccggctcggggcagctccaatgggcgaaagagctgtcccctgacccagtttaattcaagtccttgacttcgagattaatgaggagaaaggcttggctgagctggggacgggtgggggtgctgggagtcccgatgtggccccaggacgggtcctggccctgctgatggggcctgagcccctgggctccgtcttgggttgctcctgggagaagggggctgggattggagagctcagggggcgtggagggggtcccagaaaagcgcggaggggatgagtgctgtgttctgagctatttgggtcacggctggcacagccctgagcagctcttccccgcctgctcctcgccgccccctctccccacacacggggaccgccgtcccctcgcccacagcctcgcggttacacaacggccacctccaacaacgccgctccaccggctccggcctcggcccagactcacgcccgctctggcccggagacctcccgaagccgcacgcggggatccgcggccccagtcaccgccagaggcacgggtttgggggagcctcactccgcccccacggtcgggggtcagggtcagggtggcagggatgcgcgggcagagccccacagccgaggagggcaagggggacccctgcagggacgcgaccaccgtgggtacagctgcagacacagccagggcctcagggacactggcccgggggaggcacacagccacacgcacacactcactggcatatgcacagcacacacacacgtccacttactcccattacacactcacatgcacacacatatgcacaggcacacccagacacgcccacttattccaacacactcacatgcacacacatatgcacaggcacactcagacacacccacttactcccattacacactcacatgcacactcacatgcacacactcagacacgcccacttactttcattacacacatgcacacacacatatgcacaggtacacacacacgcccacctactctcattacacactcacatatgcacacacacatacccatttactactcccgctatgcactcacacccacatacaacacacgcatatagacacatgcatacactcacatggatatacccacttacacatacacaatcacacatatgcacacgcacattgcgcacagtgactcacaacacacacatacacatgtataagcatttactcccatatacaagcacacactgcacttatatatatatgcttacacactcatgcatgcaccgtcacatacacgtttatactcccatacacacacacacgtacattccattcacatctacacacacatgcacacacatattgactatagcattcatgtgcacacacacactcacatgcagtcacgcatccacacacacactcatccacactgttacacacacacaaccggacccactcacaggcccaaggaactgtgcccagaacacacaaatgcccacagatgttctcatttgcagacagcagtgcacccaggagacacactcaggtgccccctcatctcatggagacagcccaaagataaaaacatccagtctcaaccagaaacacaaacactgcacacacttgggacacacacacacacacacactgtgccactgtgtgtgtgtatgtgtgtggacaaaggcagaaacaccgtggtttaggggaaacagccttggcaagtccagaggtgtgactctgatcccaatgttgtccctccatgctccggggctcagtgcaaaccccctgggccactgtgggcctctgggaccgcacaggtcagctgtgaaatccccgccacgtggagagccctgttattctgcaaggctctgcccaccgcagaacgtttccgcggcctgcctgtcttccgggccttggctctctccgcctctctgtccttgtgtgtctctcccgtctccatagtgttctcacgctctctctcccttactctgctcttcctctctgatttgatcccttttgctctctgcctttttctgactcatgcccgaaccttgtcttatctttgtctctttttttggttgtgtctttctgcctgtgcctccctccatctctctctctctctctttctgttctgtcttcactcttccagtttccatttctgagtcttgcatacacacacacacacacgttgccacacagcccctcgtcccgtccctgggtgacaagctcaggcgctgtggggtgtagcgctcagcagcaggggagacagtgagcagggaggagagggggaggaagcacgcctcccccagcctggcccgaggcaccaggaacaggtgcccccacacccccacccgccccctgatcccacacgattgtggaggggccttggcaggtccttgggaaaacctccattccaactgctggctgcagagagaaggaaacccaggctcggagaaggggcggttcctgctaaagattgcacagccaatggagggcagagcagaattgggacccaaggcttggggcccccagttggaagctccctccagcaagctggccctgacacctggagccccagctgccagcctgggaggggctgggacccaatctcccccaagattaggccagggatgtctcccaccttcactctgacatcccagaccccgaccccccagccacgcaggaagggggatctgagtgtggaacacacgggtgccctcggaggtctgatgtcacccccttccccaggccttgttgctggtggcggccttggcgggcctgggcttgggcctgagcctcattttcatcgctgtctacctcatccgcttctgctgctgccggccccccgagccccccgggtccaagatcccctcgcccgggggaggctgcgtcacctggagctgcattgtcgcccttctcgccggctggtaatggggccccagggtgggtgggcggtggggacagggctccccaagctctttgctggccttcctgggggtgtcctccggggacatggaggaagcagacaggaaggaggaaactccctcgtccctgtccctgccatttgcaagcccacttcagcgcacagcaggaaggactgtcccatttgatggatggagaaagtgaggctctggagaggaagtgaatcaagggcagccatctggtgagaaggcgcaggggcagtcagatggcctggttttggtggctctcccattgaatagctgtgtgacctaagggagtgatagtctccctgggcctcaatttccacatctgtaaactgggcattatcatctcgcccacctcctgcgggggtaagatggagagaaagcacagtgtctgacttgcagctactctcagccaacattaactggtgatgtctgtcattccgtcattcaccagctcattcattcgacaactgtttattgagtatttactatgtgccagatactgaccaagccaggcaaggagcccctcgtgcagcttatgttctaatcagggagacggacgataaatagatataatcaccctccaagagcacctcatctgtgcccagacctgagctggtctaattccttctcacaataatgctgctggattcaggggtgtcaggcccagtttccaaagaggaaggctcagggacagaggggaggtcacctttcaaggccacgtggcttaagaggcagcacagagattcagacccaggttagtaggaccccctcacacccctcaaagcgagcttagggggcttccaatgtgaacacaccagctaccaagaacgagctctgagcacagccccctccccggcagggcagcacccacaggttgcagacagcaatcctcttccacagacggggggtcccagagggccagacgcctgccccggacccacagcgggcaaggggagggacctgtaggggtggcctgtattcaggacgcttcctcctccggctctctggcgtggggggagacaggggaggtggacaaaggcccagtgggggagagacacggccccagcccccgcagcctgggaacaagaggagctttgtaggactctgaacaatggggcggggacactgggcgtccgacccgagggatgggggtggaggcccagccggggctgggaaccgggagggtgtcaggctcccgccccctccactgcgggacaccggccgggggcggggacgggaggggtctggggccccacattcaggtcccacaatggagctctgtgtgtcggtagggtgggggcgggggcacggcttctcgcccatcctccagcctccctcccacattcccttacttccctcccagctggcccgacgcttgggtcccgggtgggggaaggccgagagctccaggctcagcgtccccccaggagatggtggcagctgccccccttgtacccttaggaacccccaggaggtgggggcggagaacgtctcagcactgaagggttggcactgcaggccccaaggaccctagggcaccctaggacaggtgccaggagggctgcctgcctggcaaaggatgcgggggaagggtgtggggcaggcagtcctagggaggggaagacggcccatcccggagctgggtgtgactggggttctgctccagggaggtgcgagttaaatcgggggctccctcccccccaccactccacccaccattaacatcacaatgacgtccctccgctgggggagtgaggccttcccgttcccttggcaaccgacgggggccaggctgaagtcgcccttttcccacgggctggcccaatgaggtggggctgagatgggaggggtggataagaaggcgaggtggaggggatggggtgggaggggacggtggcccccggggtcctgggacccgctgagattcctctccctcctcctccgctcagcactggcattggcatcggtttctatggcaacagtgagaccagtgatggggtgtcccagctcagctctgcgctgctgcacgccaaccacacactcagcaccattgaccacctggtgaggggccagcaaccagtgggaccccagacccacacctggacgggctccccacacccaaggacaaagggatccaaactcagagctaagaccccaggcttgaagcttaggaacccagattcagaacttcatcctgagacccacagacctcagactatccacccaacccccgaccctggctgcaaattgaggacctcacacacaggcccagccctggaccttacctggaacccccaagccacacagaaaccaagcaccagcgacaccagcccctgtccacgggccagatccagggccccagacctgattcttggcccgtaagcaagctcagggacccccgccctgaggcccaggtccccgacttgaggcttcagctccgacatcagctccaggattctgggccctggggctgaggcctggccccacttcatgccttagattccatgtccagctgcagactctagaccatgggacccagacttgagaccccagattctggaaggcagatgaaaacttcagacctaaagctccacacttaatctcagtcctggggctggacttactaccctgggctcaagctaccaaccatccagagctctggatagaggccacagaactccatgaacttgatcttgaagcccctccccaatcccttcccttactcaatcctcagatgtcccagactccagatctcagacacccgctactatgcacccctccttcacttctaaaaccccatgcctcgaccgcgggctccccccaggatgtccttccagacctcagcccctgtcctatccccaggtgttggagacggtggagaggctgggcgaggcggtgaggacagagctgaccaccctggaggaggtgctcgagccgcgcacggagctggtggctgccgcccgaggggctcgacggcaggcggaggctgcggcccagcagctgcaggggctggccttctggcagggagtgcccctgagccccctgcaggtggctgaaaatgtgtcctttgtggaggagtacaggtgagacgctgctcttcttgctctctgtgccggcagctctcaggcggagtccccggggggacagttggcaatgcctggaggcagttttggttgtgacagctggggagtgtgtgcgcactgctggcatccaatgggtagagcccaggaactgttcaacaccctgcaatgcacaagaaccccctccccacccattggcagggaatgatccagccaccatgacaattatgacgaggctggccaggcgcggtggctcaggcctgtaatcccagcacttttaggaggccaaggtgggtggatcacctgaggtcaggagtttgagaccagcctggccaacgtggagaaaccccgtctctaccaaaaatacaaaaattagctgggcgtggcggcagatgtctgtaatgccagctactcaggaggctgaggcaggagaatcccttgaacccgggaaatggaggttgcagtgagccgagatttcaccattgcactccagcctgggcgatagagtgagactccatctcaaaaaaaaaaaaaaaaaaaaaaagatgaggttgagaaacctactgtggagggacagatcaccagaccccatggccatcctgacacccatgtcctcacccattcactcactcaccccctccacgtcactccactcacttattcacacatgcgttcattccttgactcactcattcagcaagtcactcttggactcagttactcctggactaacccagcaggccactcactcagtcgttcatccgtgtgacatgtgtatttgttcagcactatttttttttttttttttgagatggagtctcactctgtcgcccaggctagagtgcagcggtgcgatctcgactcactgcaacctccgcctcctggattcaagcgattctcctgccgcagcctcccaagtagctggcattacaggcaggcgccaccacgcccggctaatttttgtatttttagtagaaacggggtttcaccatgttagccaggctggtctcaaactcctgaccttgtgatctgcccgccttggcctctcaaagtgttgttcagcactatttatttagcaccctctggtgaaagaggcagcgtacctacagatcaggaacctgagctcgaaagccagccagccccaccctaaccacgcggctgcaatcaagttactttgcagacctctgccttggtttccccatctgtgaaatgggaatcggggcagcgtcccccttgttgaattggttcgagttgttgagttggcatctgagtgctgagaaggacgattagcacagggagagcaccgcagagatatgaagtgtagtcaccccggtggcgggccgggcagtgagcaagtggcagaaatccctgccacgtggctgcgtcctccggggggaaccagcaagggacaaacgcagagaaaaacattgtaaggtgttgggccatgagaactttggagaaaattacagaggggaccaggcacggtggttcacgcctgtaatcccagcactttgggaagccgaggcaggcggatcacgaggtcaagagatcgagaccatcctggctaacacggtgaaatcccgtcgctactaaaaatacaaaaattagccgggcgtggtggtgggcgcctgtagtcccagctacttgggaggctgagacaggagaatcgcttgaacccaggaagtggagcttgcagtgagcagagatcgtgccactgcactccagcctgggtgacggagcgagaatccgtcttaaaaaaaaaaaaagaaaattatagagggagatgaggtgggacagagtctggcagttcatcagggggactgagaaggtggcatttggaggagaggaggcagtgagctgtgcagtgtccaggcagccacccttcccagcggccaccatgacggtgtcctcattgctttgaccattagtaatcattcattcattcattcatttatccgacgtcagctggaggccctgcccgcggggcatgcgctgagatttgggaggccttccgggatgctgcgctccagcggggaaggccgactggggctgaaaaagctggaggtcaggacacacccgcagggcagcaggtgcaagagacagacaggcctgggtttgaagaagtccaggttctgcattgtggtcaggcccaggggctgcacaagccgggcctcagctccttctcctgggcgagggcagggaagtggtgggagccataagggtgatgccagggtgaggcagacccaccatcactagaaaatatcttccgggtgcaccactgcgaaagcaccccacacttgggagtccctcgacagacaaatcaggggcctccaagggagtcttgctggaggggagcacttgcgaggctgggcggaagcagccagagaccagggtaaggagtgaagcccaagcttgtggggcctgcagagaatggcaggaggattaactgagcacttactacgtgccgggcactgtgctgttgttacggcgggtccttgctcccggagctcccaagatcgtggtggccacttccaagagggcagcaagcctcgtgttctctgacctggggttcttggcctcacggattccaaggaatggaatcctgggccctgcggtgagtgttttagctctattagaagccgtgggtcacggaagagaaccgtggaacccagcgaccagtgttcagctcgatcaggatgaacccaggcagttagctgtgcaggaacaatggcgagcctctagcccgattgggagcggcaatgggtgtctccctggatcacgagcacagtggacaccctgccggatccggagggtggaagtcagcggcgggtctgcgacggcggcaaacagcagtggtggacggcgagcgaaagctcagctcaagccgtaacagacacggaccagaagagtgtgcagtttcaagttttaatagagtgaaaacagagttcccatacaacgggaggggacccaaagtgggtagccgttgctggctggaatgcctgggtttctatccagatcattgtcccttcccctgtgctctcaggtgatagatgattggctatttctttacttcctatttttgcctaactagcactttagtgagctctctttactacctgattggttgggtgtgagctaaattgcatgccccgtgtttaaaggtggatgcggtcaccttcccagctaggcttagggattattagtcggcctcggacatccagctagtcctgtctctcactgtggcttgcatgcttgcacctcctgaatcatggtggtgggcccttcactgatatttaaggattaactttttttttttttcatttttgagactaagtctcactcttgtcgcccaggctggagtgcagtggtgcaatcttggctcactgcaacctccacctcatgggttcaaatgattctcctgcctcagcctcccaagtagctgggattacaggcgtgcaccaccacgcccggctaattgttgtatttttagtaaagacggggtttcaccatgttggccaggctggtctcaaactcctgacctcaagtgatccgcctgcctcagcctcccaaaatgcgcggattacaggcgtgagccacctcgcccggccaagtattaactattaactaacatctcagttccctcgttcacgctcaggctaacctctaagtgtgtccacgtgcttggcactctcctaagcacttctagtcatgcagcccactcgaggcaatattctcaagccagtgttgttgtgctccccacgttacatgtagggaaactgaggaacgagaggctaaggttaccgagacaagagttacccggccagttaagcggaggggctggggttgagaccaggcagcctctgcctccagacgtcatgccctccagggatgcgatgggatctttggtgcagtcttgagaacgagtatctccactctgcagggtggggttggggatggggagctcggagagaacacatcacgtgtccctggtcacagggcacatgtgtgtggcccggccaggggatagtcccaggtgctcaggacctgtattctaaaccgctccagtgtcctgtctcatgataacactatttcacagaggacctgggctgtggcccagacacagtaaacagcaggaggctgagcttggagggtggtgaatgtgaggctgagctggggggcagggtgaatgctggtggagggttgctgttccgccggggtgcctggaggcaggtttgtggtttcagccctaccctctcccctcccaggtggctggcctacgtcctcctgctgctcctggagctgctggtctgcctcttcaccctcctgggcctggcgaagcagagcaagtggctggtgatcgtgtaagtgcaggcagtagggggacccagtgcttgcctggcactctcctggcaggcaggacctcagtcttacaactctcctacacggaggaccgtggtccttcacggccgggtacacacgaagaaaagagagtcagagcagcccaggagggaggcggggacagacctgaaaacaggcagccctaacagtatgaagtatgctggaatcatggcagaaataatcattgtgttggcaataaagatgaggatgaggccaggcgcggtggctcacacctgtaatcccagcactttaggaggccgaggtgggtggatcatgaggtcaggagtttgagaccagcctgaccaacatggagaaaccctgtctctattaaaaatacaaaaattagctgggtgtggtggcatgcgcctgtagtcccagctactcaggaggctgaggcaggagaatcgcttgaactcaggaggtggaggttgtggtgagccaagatcacacaccattgcactccagcctgggcgacagagtgacactccatctcaaaaaaaaaaaaaaaaaaaaaaaaaggctgggcgtggtggctcacgcctgtaattccagcactttgggaggccgaggagggcggatcacgaggtcaggagttcgagaccatcctggctaacacggtgaaaccccatctctactaaaaatacaaaaattagccgggcgtggtggcgggcgcctatagtcccagctactcgggaggctgaggcaggagaatcgcttgaacccgggaggcggagcttgcagtgagctgagattgcaccactgcactccagcctgggcgacacagtgagactccatttcaaaaacaacaacaacaaaaaaaaaaaacagatgaggatgatgatctattgagggtcatgcacgctgagtccttcagttgcctccaccccatgaaggagctaccataaggctccatgtggccggtcagggacctgactaagagcgcagagggtggccaagtccaagactgagccgtccttaagtgtcgtggcaaagccgcaggaccacactgatttcacagctcgctctacgcgcccgacactcttctctgcactccctggagcacctcatgccccctgtgaggaaggtgcttccttctgcctgttttttatttctgttttttattttgagaaggtcttgctttgttgcccagactggagtgcagtggcatgatcacggctcactacagcctctgtcccctgaggctcaagtgatccccccacctcagcctccagagtagctgggaccatgggcttatgccaccactcccggctaagtttttttttttttttttttttttttttgagctgcaatttggctcttgttgtccaggctggagttcagcggcgcgatcttggctcactgcaacctctgcctcctgggttcaggcaattctcctgcttcagcctcccaagtagctgggattacaggcgtatgccaccaaacctgtctaattttgtatttttagtagagatggggtttctccatgttggtcaggatggtctcaaactcctgacctaaggtgatccgcccgcctcagcctcccaaagtgcctggattacaggcatgagccaccgtgcctggcctaagttttgtatatttttgtagagatggagtcttgctatgttgcccaggctggtctcgaactcctggcctcaagtgatcagcctgcctcagccttccaaagtactgggtttacaggcatgagctaccatgcctggcccttctccctgtttaacagagggagagactgaagatcagagaggttggaccacttgctcagggccacacagctagaagtgctagagctgggatttgaaccagacaggccattctcattggaggagtccctgcattctctctggccctggtggggtgaggcagagttgaacctgtacctccattgcccctgagagagtgggagagaccccgcgtaaggcttgcagacccataaacctagccaacacagggcaggtctgggactggaagccaggccttcagtttggggacccctgggtgcccttcttgcttactggtcaccctaccaatgctgacacgccccctgcacccctccccacccggaaagtccagagactttcagatttcagccctggcactgtctcccattctcagaggagacagggcagagccagaggctgatcaggctgtgggtggacttgggggagccttcgggggaagtgagcccagaggtgagcagtcaccgtcccagggtcctggagctgggatccaagctgcgaccacccagcccagggccctgctcataccccacaccctgctcatctgggcaggagccagatgtccagctggacatcagcagccactggcctacccccaaccactgaacttgtgtttccctaattctgatcctccaggctccagaggtgggtggaggtggggggcggctgtgatgggatttggggtgtggaaagaggctaggctaggagattaagaaccccgggctgatcctccctcccccactctaggatgacagtcatgagtctcctggttctcgtcctgagctggggctccatgggcctggaggcagccacggccgtggtgagtgccagggccgggccattgggctctgggactcagggggcctggagacttcaacttctggatctcgggatggcatggcttagtagagaaaggaattggggggcacgatcacagctctgaggtttagggcttgtttcctggggcctgagtgggtacagattggtgtcctggacgtttgagctgtaatggaggaggggctggaaacctggattcctaggtctgagggaggaggggctgggggtctggactcctgggtgtgagggaggagaagctgggggcctggactcctgagtctgagggagaaagggctggagagtctgaacccctgagtctgagggacgaggggcctggggcctggactcctgagtctgagggaagaggggctgggacctggacccctgggtggggaggggagctggggagccaggcactgggtgctgtgggagtgtggaatcggggcagttttgggtttgagccccttttctgctgcctcacgcagggcctcagtgacttctgctccaatccagacccttatgttctgaacctgacccaggaggagacagggctcagctcaggtgatttccaagggcccggtgggtccgccgggttgggcagtgcaggccctggcttcctcaggcctcctctgtgcccggtcctgcccagggtggggtgggggtgcagcctgccaggcgagacccagccctctggaagggaagcagggctcctggccactccccagctcggagccctcctggagccccgccacccgccagaccctcatcccttctgctccagctggcagcgcctctcctggtgggctggaaaagagggcaggataaagataatggtgccaggaagagagaggagggtcaggagagggtgctcctgggcgtcaggaatggggagtttggccccctggagaaaactggggagcaccatttagtcaggggttcccagggagtatagggttgcccaccagcgcctgctctggctgtggcaggagcagaagggacgcggggctggcgggtctctgaaggtaaggccatcgggctccagggctgggctgaggcccctaaccctgctaaccccccagtgcccggccttcccccgggagatccctgggggcccaggctcatggcctcctcccctctcctcctcccacttcagacatcctgagctattatctcctctgcaaccgggccgtctccaaccccttccaacaggttagggctgcgggcaggggaaacgggtgttgagggagccagaaatctggactctgaagggagggggcggggctggggctggggcctggactcctgggttccggggaggatgcaggccaggggcccgagtgctgtgtccggaggagaggagagagggccgggggcgtatactcctgggtcctcctccctccctttctctttctgcagaggctgactctgtcccagcgagctctggccaacatccactcccagctgctgggcctggagcgagaagctgtgcctcagttcccttcagcgcaggtcggtgggtgggcgctccccagacacgcggaccccacggggaaggcggacggggcgggatggagctgtggggcgtaggcggggctgcagagctaggcggggccttgggttgtgggcggggacgcagggcggggccagggcgatgggcgggcctgaagagttcgtgggaaaacgacccctcctcgccccgcagaagcctctgctgtccttggaggagactctgaatgtgacagaaggaaatttccaccagttggtggcactgctacactgccgcagcctgcacaaggtgaagcccctcccctcccaatttcttctcccacggggggcctctgtctcgacccacagaactacctcctccttctccttggacccctgccattgcgcctgaggatatctctgtatcctctgtttatatgatttatctgtcctatatctattctctacctatttataacctgtcgtctacctacctatcaagcattatccatattccttccctcctccctccctttccccccaactcccgcactccccgctgggtccccatcccaccctccccgtcccttcctgccaccttttccttccttgtcttctctcctctctccgtcctcctgcctctccctccctcctagaggctgccgcttagtgagttctggagcaagactgcctgggttccagtcctacctcctgaccaagggcaagtcacctaacttctctgtacctcagttagttccctcacttataaacctgggattgcaagagtgggcacctgtccagctcccctgcggcttgtgctgttcatacactggacaggcaggggtgggcagggtgcccaggaggaaagatatctggtgtcctgcaggctccagtttgggctctgccgcaggctgcacggccataggcaggtgagcgtggctgactctgcttcccacccgtaccgtgaggaaggacgagttttttttgtttgtttttttttcactggatggctgtgaggattgaaaaaaaaaatccccttataaaacagtaggagctggccgggcgcggaggctcacacctgtaatcccagcactttgggaggcccaggcgggtggatcacctgaggtcaggagttcaagaccagtctggccaacatggtgataccccgtctctactaaaaatagaaaaagttagccgggcatggtggtgggcgcctataatcccaactactcgggaggctgaggcaggagaatcgcttgaatccacgaggcagaggttgcagtgagccaagattgtgccactgcactccagcctgggcaacaagagcgaaactctgtcacaaacaaacaaacaaaaccagtaagagctgttctaaaacacacacccgaggatgcctttccccggccagtcttcccatcaaagacctcacatgtgcatagcttcaccaagtacctgaccctgttgcatttcacaggtggtaactcatcgatgcctcataacaatgctatgaagaaggaactatgattatcccacctaacaggttagaagatgaggagcagagttgagggaccttcccaaggtcacacggccagccagcccatgcacactgaggagagagggaccttccggagggccccgccctctgccccccacagccaggcagttgcccagttttgtcctttctgcttctggaatgtcttcatccatctactctcaatgcccaatgcccctgccgcagctgaggcctcgttctctcccctgcagaaggaagcatggccccctccccatccatccccccatggaccctagaatagggctgccagattcagcaaacagcaaaccactctgctataagtacgcccggtgcaatgctggggagatacttatactagaaaattatgtattgggcatccgatactcaaatgtaactggaagtcctgaatttgatctggcaaccctacccaagagggatttgtctacgccatcgcatggatctgagctttccctggtctggctcagacagaccccttctgtggctcccactgcctcccacccttctggaactggcattccaaaaagggagtggggagtaagcactgaagccatgctcagaattgctgactattgagctgagaaaggctgggcccccacccagcccagggctgccctgatcttttgcataaggataaactggggttcaggcgcttttctgtggcctaggcagaaactgggctggaatacaggcccccagactcctttgtggagggagggaagggaaggaagaggacagatcactctacccttccctaccactgcaccatgagaccctgggtctccatctcccctgtcagtgtg[133 bp omitted]cagcatggcgaaatcccatctctactaaaaatacaaaaaaactagccgggcgtggtggcacacccctgtattcctagctactcaggaggctgaggcacgagaattgcttgaacctgggcagtggaggttgcagtgagctgagatcgagccactgcactccagccggggtgacagagcgagaatccgtctcaaaaaaaaaaaaaaaaataggagggggctagggatgggtgcctcgtgcctataaacccagcactttgggaggcccagtggggcagatcagaactccttgagctcaggagttcaagaccagcctggccaacatggtgaaaccccatctctattaaaaaaaaaaaaatcaacaataagggacatcagggatgaggatgaaggagggagggcactggagcctaagagaatcagctccaatatcgcttctgccccttccagacagtgtgactctgggcaagtagcttgccttctctgggctgcaacttctttccaccattgcaagaggcggcagcgtgagagggtcagtgtctgcctggcagggctgttgtgaggatgaaggacagtgtgcatgtaccaatactctcaaaacagagcctccattgccccgacaggtccgtaccccaaccctcactggcttagtaacagacaccccacctcaaccaggtgctcctgccagaaactcaggctcttagctcccacaaccattctcagaacaagttctgttggcccttcctctgaaacctatatggactcccaccgctgttcctaccaccattgctgtgccctggtccccgcatcctagccaccatgaccacaggggcctcttccctgtcccccctcgcctacccccgtctgtcctccatgcagcagccagccagccaggtgatccttttaaaacacaatccgatcaagttcttcctctgcttaaaacgctcagtgattcccctcagacatggattaaaatccctgttcctcgccctgacctacaagggcctgggtggtcagtcctggatctgtctgcctctggcctcagcccctcccagcttcctctgcacagccctctgcctggctccttcctggaggacccatccctgctagtggggttacccgacctacccctgccctgcactgacccccgccctcctacctcgttgcacaccagcctctgagatgaccttctcggtcctgtttaccgaagtttcctggtactgggggcagcgcctggggcagagcaggctctgtcaacccccactgaatacatacgctgtgcaggtgcttagcactcggtgaaggccgtttctgctgatttcttgggacgacagtcatcagagccagcatttgttggcatgttgagtgtgtattgtgtgcgcggtgtcatcttgagccactggttggtttttcgacgtgctgttccacgtgctctaggccagtgattctgcccccagggacacctggctgggtgaggagttctgcccccagggacacctggccgggtgccgagttgctgttggttgtcacactgcaggagggggtgctcctggcatctggtgggtggagctgagtggggctgctcagcaccccacaacacacagggcagcgccgtcaccacagagaatgatctggctcaaaatgtcagcagggcccaggttatgaagccctcgcccctggaccaaggcggagctggcggtggctggcctgtgggcgcttggtgcaggggaggatgctcttgcaggaggtgccgctgccgggagggagaagggaaacggaagtagcagttctcacgttcctgggtagatgaagatggaggagagggcccagggctggtgggagatgctggactggttctagatgtggggtgctgactggggaggacccatgtgaaagggagataggggcctgcaatgacaagggcgggtgcagctcaggagaagccaagtctggaggctgggcaattaattcctgagtgccaggcctatcacaccaaagaccccactgtacccactgtattctcagaactgccctttgacaggggaaactgaggcacagagtggtcagttgacgtgtgcagtaccacagccgggaggacggtcagactgatgtgcacagtgtgtgccgatgggggagggggtggggacgcatggcctgatgacgccctcccctcaggactatggtgcagccctgcggggcctgtgcgaagacgccctggaaggcctgctcttcctgctactcttctccctgctgtctgcaggagcgctggccactgccctctgcagcctgccccgagcctgggccctcttcccacccaggtcaggagcgggggagggtagggtcctggggagggaagaggaggggcagcacctggggaccacggtggcagtgggggtggggggtgcagcctcctgatgggtccccatcccgcctctctgccatgccccgcatcaaaccccagtgacgactacgatgacacagacgatgacgaccctttcaaccctcaggtactggatgcctgggtctgagggaggaggggcggggggtcctgaactcctgggtctgagggaggaggagctgagggcctggccgcctgggtctgagggaggaggggctggggcccggactcctgggtctgagggaggaggggctggggtcccacagtacaaagccaattcccactccattccctcctctcccccgctaccccgaatctcctagcaggaatccaagcgctttgtgcagtggcagtcgtctatctgagcccctcctcccggctggactggagcctggctcccctcttcggtgagcttccaagggccaccccagctcctgcagccgggcctctgcccccctcccgccctccgagctgctccaggcatgggctgcgtgcctcctgctgggtggatcgcaccgggcaggccctccagcctgcatcactgccctgtctctccctctctccgcagttccttccctggctgccggaggagaccccactaacccagcctgcctgggctctgaccactaacactcttggccatggacagcctgcacaggaccgcctccctgctcttggccactgtgctcccatttctgtccttggccttgggagtagctgagggggcagactagggagtagggctggcaggggagggggcagacagcctcgcctcgcacccttcatccctggctgccggtcccatccttggagggactaagctgggggtgggggacatgagtccccctgctgcccctgccacatcccagtgggctctgaccccctgatctcaactcgtggcactaacttggaaaagggttgatttaaaataaaagggaagactattttacaagcagctgggtcctccttatttctcctctcccttgattcggcctcctggccagggctgggacatcctccctgctgtcctctctcccccggcctcccagctgccaggaatttctgcgcctgtccaggctcagcaaggggtccaaagacattgttctttaaaaaaaaaaaaaaaaaaatcaaaaaacaaaacgctttcttctgattctaaaagtaatgcgcgtgtcctgacacaggaagacacaggcatctctggcacagaatagatggcctagaaatagatctaactgtgtgtgtgtgtgtgtgtgtgtgtatatatatatatacacacatgacagaagacagatttcaagtcagtgtggaaaggacggttggtttagcagcagtagtgacatatcggctctccatctggccaaaaacttctatagataagatgggtggaagatctagatgtatgcaagtaaaggcacagaagaatttctagagaaattaggagggtgggcatggtggtgcatgcctgtggttccagctactcgggaggctgagactccttgcttgagcccgtttcgaggtagcagtgagctgtgatcgtgccactgcactccagcctgggcaacagagcaagaccctgcctctttttttttttttttttttgtttttgagacggagtctcgctctgtcacccaggttggagtgcagtggcgcgatctcggctcactgcaagctccgcctcccaggttcatgccattctcctgcctcagcctcccaagtagctgggactacaggcgcccgccaacacgtccggctaattttttgtatttttagtagaaacggggtttcaccgtgttagccaagatggtctcgatctcctgacctcgtgatccgcccgtctcggcctcccaaagtgctgggaatacaggcgtgagccaccgcgcccggccaagaccctgcctcttaaaaaaaaaaaaaaaaaaagacaaaaaacagagagaggctggctgcggtggctcatgactgtaatcccagcattttgagaggccaaggtgggtggatcccttgaggccaggagtttgagagcagagtggccaacatggtgaaaccccgtctctacttaaagaaaaaaaaaattagctgggcatggtggcacaggtctgtaagcccagctactcgggaggctgaggcaggagaattgcttgaacccgggaggtggaggttgcaccactgtactccagcctgggagatcaagtgagactccatctcagaaaaaaacaaaacaaaacaaaacaaaccagagaaattaggagaatatttgtatattgtctgcatgtcatgtatctgggtagggaaaatggggagggaggagtttaagcaggagatcataaaaccagaaaggaaaagatagcttagttggcaaattatagattgaaaaacataccgtaaagtcaaatggcaaattgacagactggggaacagtgagtgtgtgcgtgcgtgtgtgtgtgtgtgtgtgtgtgtgtgtgtgtgtgtgtatgttaacagttatgatgcagaaatgttattcttaaaagatataatctacaaaagctttcataaactaagaaaaagacaacccatttaaaagtaatcaattgagttgaatactcaataaaaattccaacatcagtaaacagacaaaaagattcaaactctaataattgggaaatgcaatttgaaagaatgagaaactacactttttcactacctagacacaatgaaattaacaagagtggtgatgtcctgggcgggcgaggacctagaggaacaggcactcaaaacacttctcctgaggctgtgagctgccaccatcccttgaaaaaaaaaaaaaatgcgcttgtatgtgatcagatcaaaactgcatacaccccatgccccaacaatcctgcttttgggaattgatttacagaaaaagacacacaggcttctgaagacttctatttagagctgcctgttacaacgataccactttgatcagctaaaccctgaaaacaaacatgcacaaaaagagaagtccaataactgactgcacagcagggctctctggaagaaaccagctcttggctgagttgaggatgtgagggaaaagcctggcagagaggagctatcagagcagggtgtggcagacagcagtggcagagtggactgaaggagaggggcctgcacagtgaagggcccagcttatcattcaaggcaccccaggccaccatcctggccctgcttttcatgaccttcacggatatgggaaagtcacttgacccgttagacctcggttgcctctttgatcaaacgggtatcagaaatccaaaattccaaaatccacagatccaaagagctccaaagtcaagccatccccaagctcattgggcaggaaaacctgacctgtgttggtgggagatgacttacagacatgactgacacgcttggtgtgaacgttcacatacttccctgcagaaaagttaaccaggctgctgcacactgctgtgctgagcactgagggtgccgtgtgccctgtggagtagagatcatattgcctttgcaactgaaaaatcctgaatctcaacacacacctggctccgaggggatcgagttggtgcttggtgacccacagtgccagatgctggtgtacagcgtggggcctgctgctgctctgtgcctgtcaatcatttctattttgtgtactgcaaggagcgttcagaggaagctttagatatgtgggcctgacggtgggaataaaaatcaactgcaatttcagggaggggttctgggggccacatgcgttcactcactttttcctaaccatgtgggctgtctgccccaggcccggccctgctgctatgctgacttctttcctctcaaacactgccctctagtgcccctgagcccatttcccaagcacaggcatccgctggctgttgggcggctgcaaagtaccttgagactcagctgcttgatctcccatgccaatgagcctgggggtgatctctcaacaagaagttggccgggcaccctggctcacgcctgtaatcccagcactgtgggaggctggggcaggcgatcacctgaggtcaggagtttgagaccagcctggccaacacggtgaaaccccatctctactaaacacaaaaattagccgggcatggtggcgggcgcctgcaatcccagctactcaggaggc[137 bp omitted]aactttacaaaaggaaaatccagtgttatttttagaatgttacctatgggggcttccactgcgaccaggatggagtcacagagactggacttgaccccccaaaaatagagtaaatacaagaaaacaacagtggtcaagactctaccaagaaagtgatccctgaggaacgggaaacatcaaggcaagccctaaaattgccgctgggtcctgttgcaagtttctagaccacgggacagggagggaagactgaggcggagctgggaggactccgtgagcagaggagacaaagcagggagtctga[133 bp omitted]aacatggtgaaaccctgtctctactaaatatatacaaattcgccgggtgtagtggtgggtgcctgtagtcccagctactcgggagcctgaggcaggggaatctcttgaacctgggaggcgaaggttgcagtgagccaagatcgcgccattgcactccagcctgggcagcagagcgagactccatctcaaaaaataaataaataaaaataaaaataaattatcttggacttccagcctccagaactgtgagaaataagtgtttgttgtttttgagccaccagtccatggtcctctgttactgcagactagaatgccagggaaagaaccacctggagggactgaagcaaatagcgcctgagttctggggactcacacaggccttgacaaggcgctgttcctgccagaagaacctcataactgaaggaacactgggtagaacacggagagggtcttacatcagccgtggggaataagcagccctaacctgttaaacactgttctggtcctgcctgaggaatcttaaaagcaaaacctgaaaggatcaagctgcttccaagtaaggtgactgcattctcaaacaaagctcaagaatatttataggcatacaaaagtaacgagtgctcgacaaggtaatactgatattgtctagtatccaacaacaaagtcaccaaatatgcaaaaagcaggaaaatagggcacatcatgaggataaaaatcattcaactgaaacggacccaggagttagaattagtaggtaagaacattagaacaactattatactgtactccatacgttccaaaagttctttacagatacggaagatataaaaaaactcaaactggatatcaacagatagaaattacaatgtctgaaataaataatgtactggctggaacagcagatttttgttttttgggggagagtcttgctctgttgcccaggctgtagtgcagtggcatgatctaggctcactgcaacttccacctcccaggttcaagcaattctcatgcctcagcctcccaagtagctgagactacaggcacctgccaccacatccagctaatttttgtatttttagtagagacgggctttc[132 bp omitted]aaaaaaaaaaatctggaagacaacattagaaactgtccaaatgaaacatttaaaaaaatgatttttttttttttactttttagacagggtctcactctgtcacctaggctggagtgcactggcgtgatcatgactcactgcagcctcaacctctccagctcaagcgatcctcccactttagcctctcgagtagctgggactacaggcgcacaccaccatgtttggctaatctttaaaaattttctgtagagatgaggtctcaccatgttgcccagggtggtctcaaactcctgggctcaagtgatcctactgccttggcctcccaaagtgctgggattacaggcatgagccaccatgccctgccccagaaggaatgaatatatttttttttaatgaaaagaacactggtgagctgtgggacattttaatatatgtgtaactggaggcccataaggagagagaaagaaaggaacagagagagtgtttaaagaaataataaccccaaatttcccaaatttgatacaaactataaaaccaaagatacaagaaactcaacacaccccaagcagaagaaacacaaagataaaccaagatacatcataatcaaatttcttaagaccagtaacaaagagaaaatcttgacaacagccagatgaaaaacaaaaagattttataaacagaggaacaaaaattaggatgacaccagatttctcactggaaacaatgtgagaaagcagtgtaagaaaattcttaaagtagcaaaagaaaaaagtagtcaacc[220 bp omitted]gaggcaggagaatggcgtgaacccgggaggcggagcttgcagtgagccgagatcgcgccactgcactccagactgggcgacagagcaagactccctctcaaaaaaaaaaccaaaaaaacaaaagtgaagacaaggccaggcgcagtggctcacacctgtaatcccagcattttgggaggctgaggcaggcgtatcacctgaggtcaggagttcgagaccagcctggccaacatggtgaaaccccgtctctaccaaaaaatacaaaaattagctgggtgtggtggtgggcacagagcagagatagaacagtatcataaggctgggcgtggtggctcacacctgtaatcccagcactttgggaggccaaggcaggcagatcccgaggtcaggagtttgagaccagcctagccaatatagtgaaaccctgtctctactaaaaatgcaaaaaggagctgggtgtggtggtgcacgcctgtaatcccagctacttgggaggctgaggcagtagaactgcttgaacctgggaggagtaggctgcagtgagtcgagactgtgccactgcactccagcctgcatgacagtgagactccgtctaaaaaaaaaaaaaaggtatcataaaaaatgctcaaacttccaaacttctctccacaaatggtgctagaacaactggacatcaacatgccaaaaataaataaatcaaatctatacacagaccttagtctcttcacaaaaattaactcaaaatggatcatagagctgaatgttaaatgcaaatctataaaactcctagaagataacataggagaaaacctacatgactgggttttgtgaatttttttttttgagacaagagtctcactctgtcgcccaggctggagtgcactggcagaatcttggctcactgcaacctctgcctcctgggttcaagtgattctcatgcctcagcctcctgagtagctggaattacaggtgtgcgccaccacgcccggctaatttttgtatttttagtagagatggggttttgccacgttggccaggctggtctcaaactcctggcctcaagtgatccactcacctcggcttcccaaaatactgggatgacagctgtgagccaccacgcccagccgtgataatttttttgatacatcaaaggcatgatccatgaaagaaacttacaagcttgactttattaaaataataataaaaaaacccctctgctaggccaggcgtggtg[131 bp omitted]gtggcaggtgcctgtagtcccagctactcaggaggctgaggcaggagaatggcgtgaacccgggaggcggagcttgcagtgagccaagatcacgccactgcactccagactgggcgacagagcgagactccatctcaaaaaacaaaacaaaacaaaaccctctgctctttgaaaaacatttttaatataatgagaaaagctgcagcctgggagaaactatttgcaagagacctatctcatgaaggactgctatccaagatttacaaagggctcttaaaactcagttaacaggaaaacaatctgattaaaaaataggaaaaggggccaggcatggtggcttacacctgtaatcccagcactttgggaggccaagacgggcaggaatttgagaccagcctggccaatatggtgaaaccctgtctgtactaaaaatacaaaaattagccagcatgatggcacgtgcctgtagtcccagctactcgggaggctgaggcagaagaattgcttgaacccgggaggcggaggttggagtgagccgagatggtgccactgcactccaacctgggtgacagagtgagactcggtctcaaaaaaaaaaaaaaaaaaaaaaaaaaaaaaaaaaaaaaaaaggattgtttctgggtgtgtctgtgagggtgttgccagggaggctgacacttgagtgagtggacggggagagggagacccactctcagtgtgggtgggcaccatccagtcagcgcagaaggtgggaggggctggcttgctgagtcttctggctttcatctttctcctgtgctggatacttcctgtctttggagattagactccaggttctttggcctttggactcttgaacttccaccagtggtttgtcggggactcttaggccttccgccacagactgaaggctgcgccgttggcttccctacttttgaggcttttggactttgagacgtgactggcttcttccttcctcagcttgcagatggactatagtgggactttgcctgatgatcctgtcagccagttctccctaatatactccctttcaatatatacatatatcctgttagttctggccctctggagaaccctaatacagatggcaaataaacacaggaaaagatgttcaccgtatgtcattagggaaccgtccgttaaaacaagacaccactggccgggcgcgggggctcacacctgtaatcccagcactttggaaggccaaggcaggtggatcacgaggtcaagagatcgagatcatcctggccaacatggtgaaaccccgtttctactaaaaatacaaaaattagctgggcgtggtggcgcacgcctgtagtcccagctactcgggaggctgaggcaggagaatcgcttgaacccaggaggcggaggttgcagtgagccgagaccatgccactgcactctagcctggaagacagagtgagactctgtctcaaaaaaacaaaaaaaaaacaagacaccactacatacctattagaatgccaaatccaaaatgctggcaccaccaaatgctggcagaaatgtggagcaacagaaacccttcttcattggtgctggcaatgcagaatggtacagctactttggaggacagtgtggtggtctctcataatcctaaacatactcttagaatatgaaccagcaacactgctccccagtatttacacagatgggttgaaaacttctgcccacaaagaaatctgcacgtgcacgtttatggcagctttctttatcactgccaaaaacttggaaggaaccaagatatccttcaataaatgtcttactacattctggttgttgtaacaaaataccatacactgcgtagctgaggcaggaggatcacttgagcctgggaggttgaagctgctgtgggctgagacagagatcacatcattgcactccagcctgggtgacagaatgagaaaccctgtctcaaaaaaaaaaaaaaagtacagttttggtttttgctgtgactgggctcctggagtgagagctctggatcccagctgcaagatgaggaatctggagccgagagaagggaaacgagttttccaagtcatacggctggttaagtaaaagagccgggattatgacttaggtttcctgccccccaagattattattttttgaaacagagtttcgctctgtctcccaggctggagtgcaatggcatgatctgggctcactgcaacctccacccccagggttctagcgattctcctgcctcagcctcatgagtaactgggattacaggcatgcgccaccatgcccggctaatttttctgtatttttagtagagacggggtttcgccatgttggccaggctggtcttgaactcctgacctcaggtgatccacacgcctcggcctcccaaagtgctaggatcacacgcatgagccaccgcgcctggcctacccaagattattaaaataagttttcagaagcaaccccctactggccaggcgcagtggctcatgcctgtaatcccggcactttgggaggcagaggcgggcgggtcacctgaggtccggaattccagatactgtgaaaccctgtcttcactaaaaatacaaaaattagctgggtgtggtggtgcacgcctgtaaagagaattgcttgaacctgggaggcaaaggttgcagtgagctgagatcgtgctactgcactccagcctgggcgacagagccgtctcaaaaaataataataataatagattttttaagaaaagcaatcccctagtgacttcttagagcacatcatcagacagttggggtaaaattctgaagtggattaagggaggggtgctggtttgcctggatggctacatgaacatagccctggaaccaaccaaatatgtaactggacaacagaaaaataagtacagggtgcattaatcagaggcaacaatgttttgtacttaagtacacagaagacacgatgtgaagacaccaagagaacagtacttttcatggttagacacatttcttaggtattttttctactttgggattcttttgtgatataatttgtcctgtttacataatttttttccctgacatgtaagataaatgtatctaattgtgggcttacttgtaaagagttttcacatttaagttccagtcatttcattttatcgctgtatctgtgtacagaatgctaaagaataagacataaaaaataaaagtacagttataaacacctcttttaaaaggcagagactgttcgcttgggcaaaaaaaagcaagatccaactacatgctatctacaagaaacccaccctaaatacaacaggtaaaaggaagctaaatggaacgtgggtcctggcttgtaccctggcatgtaaagaaaacattggaggaaaaggtggtgaaatcccagtaaagtctgggttttagttacagtaatgcatcatgtcagtatctacaacaaaccacttttgttggtgcttgtgatgacagcatcagaagaaagtgggcataaaacatggtggactgcttatgatctttgcaacttttcttttttttttttttgagacaagaatttcactcttgttgcccaggctggagtgc[132 bp omitted]agacgggacttcaccatgttggccaggctgatcttgaactcctgaccccaggtgatccacccatctcggcctcccaaagtgttgggattacaggcgtgagccagcgcgcccggtctttgcaacgttttgaataaatccaaaattattccagaacaaaaagcttagtaccaaaaagaaaacaaaaacaaaaacaaaacaaacccccccccccccacagagtaaaataacggaaaaagatctactatgctagcactaacaaaataatacgtagttatgaaaatggtatgtatttttcaagctagacgttcataatggtagaacatgaggaggaaaactgcctcttaaatcccaccacttactgtgacacagtgaccggtccctgcagcggactggatagttgtatcagagtcctggacggaaacagatggcactcaaaaggtggcgcgcagttcagagaaatgcctatgtacggatttggtccaatgcctcagcctgacctcagggaccttcgggggtctgctccgcgcccacccttacacatctgtgaccccacacacttccaccccagcgccactgccaacagctacacccatccccctccaaccgcgtcagcttccagcctcggtccatctgaactcgccgtgccccctcccctgcgcccttccagattcatttgctagggaagcccgctcttccgggtggagctgttcctcatcccctttctttatcattctctccccagggcttccacatcaccgtgctgtggacaatcccggaactcctgtcacgccagtttacatttaggaacagtaatggctcccactgactcagtcaaaacaaggctgcggccgggcacggtggctcacgcccgtaatcccagcactttgggaagccgagacggagggatcacgaggtcaggagttcgagaacagcctggccgacatggtgaaaccccgtctttactaaaaacacaaaaattagccgggcatagtggcgcgcgcctgtaatcccagctactccggaggctgaggcagaattgtttgaacccaggaggcggaggttgcagtgagcagagatcacgccactgtactctatcgtgggcgacgacagagcaagagcaagactccgtctccgagaacaacaacaacagcaacaagaaaacaacaataaaaaaaataaggctgcgtgggaggcagaaagagctaatgcggccacgcttgtctcctcggggccaccgtccccacccagacttccggtctgccttaaaatgttcatgcgtaagtgcgtgggcaggaaggcgggctcaagcgcagctcgtggcgttcattggctgtgcagggccgagggaggcggtgcaaggccgccgcgtgacgtcaggacgccgcggtcaggacgtcgaagccaaagaagaccagagccagccgggtggcacagcggtgtcgtggccgtgttgctgatcgcctgggtggttgttggcgtgtccctgcagcgaaggatcctggttggtaaggggagcggcaggcgagcaggcgggcggggatagcatctccttttggtcttgcgccccgcgagccccgaggccttctcggccgtcgcagcagcagacgccgcgcgcgagcgtcgacagggtgtggcggcgcaggggcagccactgcgcctgcgcaccgggcctggggccgcgcgttcgggcactagcgcgcgtgcgccgtcgtcttctaatttccgttcctctcccttggagttctcggggccccggggcgcccctcactcgccgttgaccgggtgttgccccgggcgacgggcggctcctgcgcgtctttctggggcgtggtgcgcaggcgcggcctgggcagtggctccgtggctagtcgtggggatccgagcggcctcctccacccggcgtcctcctttgccttcgcccagcctgcgggacggccaggtgctcccgggacctcaggcctcgcgtctgatgcctgtctctgttcttgagacccgtccgggagtcctctgtccagcccccaactcctgaccttacctctaatctcccttctgccctggggctcctcttcctgtgtccccgccacgatccctcgtctccacccacgccctgtgtcctgtttaagttaagcctttgcgtttctagggcttttccccagctccagactcccgttcctatcccgtcaactcgtgggaattccggttctcctgcgggattaattatcctacttatcagttactccctctcgggagtttaggctcctgaatccttgctccggagacactccacttttcttccaattctctctgtaccccactcttaattcgttgaacatgttttgggtcttctttggcattcccaaagctttatgtccagacacccaaccacggtgatcccttttctctcccagccctacccctgcttccgggaacctcccgtggaagcaggcaggggtagtcccactgaggactcccacgtaggtctctttactgcccttcggagacctttttgaaatcagtctgtcagtgctaagaacccatttcttcacgttggggttcacgttggcattctcaggaacgctcaacgaccacttgcttccagggttaacttccggaaaatccccttttcctctcaaaattttcttctcttctccaatattcttccagccccctcgatgctccctgaaaggcctcccttttcacagagttctcggaaacctttccaccctctcagccttaagggttccctcagactcttctcattat[131 bp omitted]gccctccgcctcccgtgttcaagcgattctcctgcctcggcctccctagtagctgggattacaggcatatgccaccatgcccagctaatttggtatttttagtagagacgtggttactccatgttggtt[133 bp omitted]cctaccctctggacctttcatcacagcctctctttgctcacatgggtttcagacccttctccttccctttgggaagtctgctctggcttccctgtttccaaatccttcgttttccacctggagctctacaaaggggccaggggcttcccctcactccagcctttctagtccacacccagaactcttcagatccttgaccccagtggcttttcagtcagcctccccttttctgcccggcttctcttgagtccatctacttttcttccccactttgtgacgtgtttttagctcccccttaagtctccctaactcattctttttctcatagacagtgaaaaagcagtctggctcccgaggtccaccccttataccccaaggtccagatggcggccaacgtgggtgatcaacgtagcacagattggttagtgaggcgagagggatggaggccagtcgggagggaaagaggaagcaagacccagtgctgtcctctggggtgggacctcccgtggccttaggggaggtgatgccacaatccctgtgggtgggggtggtggtgaggcaaacacagagggaagcatttggttgtggtgtggagaggggcaagctttcacctctctgagctttcgtttttcacagtacagcgcttgctttgcagaattgtgatgattcattcaagcaagtgtaattaggaggcagcttcccaacactcaatacacagtcatttatttgtttttctgctgattccttattttttctcaaaatagtgtgataacctgccgactggggtgatgtcagacagaattcattgattcatgaaagacatagccctaggaggtgccaaggcctgtgttcagttctgtgggttctgttaattgttttgtttgtttggttttaacaactgctgtgtgccaggctctgggataagtaccttaagtaggtgatctcatttatccctcccagcagactctgaagcagaaaccctttatcagcatagtacagattagaaaacttaggcttagactggtagtaacagttagatatgggatccaggggctggaatttgcctcccaacttgcccacctgtgtacagtggggagaacaggtgtgacttgatgtcctctctctctgcaggtcttctcagtacagcatggtggctggggcaggccgagagaatggcatggagacgccgatgcacgagaacccggagtgggagaaggcccgtcaggccctggccagcatcagcaagtcaggagctgccggcggctctgccaagtccagcagcaatgggcctgtggccagtgcacaggtgagaaggcctcatggggctggggtaccctgagccagaggttgtgggagggacacagtctggcgtcctgttgtatcattcagacggggtgctctgaggggaaacatgaaaagacgttccagggtatctaaatctgaacgggaaaaagttctgtttccttgaggaaattagggcgtgatgtggttctgaagagggaggccatgcccatgcccctggtctctaacgtgcgtgagtctcatggtagagacagtggctcactttgcagatacatggacccagtttcatcccttggcaattggccaccagtaaacaggcttgccctttgggggccgtgtgcctgtggatttgggctgctgacggcacatgtgcctctgcttccacagtacgtgtcccaggcagaagcctcagctttgcagcagcagcagtactaccagtggtaccagcagtacaactatgcctacccctacagctactactatcccatggtgagtgcccagccagtggggcggggcagggcgaggtggagtctgctgggtcggggcgaggtgaagtggagtctgccgggatggggctgggtggtggatggactggagatcgcagtgataactgctcagaaaccctctaacttgcccaggaggtaaattcctaggtccccgccatgagccacaaggtcctacatacccggttctggtcccttctctcctcatgctcattctgccatggccatcgaagcagagacctccttgatgcccgcacccgccaggcccgctctcgctttgccctggctgcagtgctccctgtgttgccgcctcttggaggtctctgctcagatgccgccttcagagagcctctacctgacacactgattgaaagtagcattcctgcctcgcagcctgtccctctccctttctttgccatcttattgtttcatgatccttattgctggatgtattacatgttgatgtctccagccggacatgtaattccagcacaagcttcattacagcatgggttttccttttgttctgtcgtagtgcttagaagagttggcactcagtatcgttgattatattcttccgagaactagctaagtgagatgtgggattgatagaggtttttcttttcctaatatatgagaggatgtggtgcattaatatagtgaagagagaaaggggtgagggattggtagagggtcatggctggtgtagttcctgagcaggctggggaagcggaaagggtaggcctcccactaaaccctccctccctgcgcctttgcagagcatgtaccagagctatggctccccttcccagtatgggatggccggctcctatggctcagccacaccccagcagccatccgcaccccaacaccaagggactctgaaccaggtaacatcctagcccagctcccataccctgctcaagcagaggaagtgtagatttttgaatgagctgtcaatgaggaatggcttgtactccttaagctgcttttttccttccaagcaactcctgatctgaaaatgaggaggacagagcatagtgtttgaacctggggtgggtttaaggctgagccaaggccagggctgagatgttgaaagacatctcatctttttccctagcatggtcacccacaggcgtgcacacaccggctgggttttgcattgaatgtgcagcttggaggaatggccgggctagtgcacaggaggcaggtagacctgggtttgaatcccagctgtcccacccctggtgtaattacgcatctcggtcagctctcgaaagcgggaaggatggtagcctcatccttgggctccatgagtgtgtgtgctcatgggtgtcttgtgctcagatggtagcgctggagtgggtgtgttgtcggtggctgttactccagcattgaaacgctgccagctgccgcttcatagcttagggccctgggaagtcgcttagtctctgagctggagccttgtcagctgtgaaaagggctgttaacaaatgttaacctcacagagttactgaggactcgaatgaactcacatttgggaaggtcacgggagggttgagtgctgagtgctgtgaccactgcgtcctcacagcgagggctgagtgccactcgccagccccagaatctgcctcccgtgctcagcgcctgcttccttctgcagcccccagtccccggcatggatgagagcatgtcctaccaggctccccctcagcagctgccgtcggctcagccccctcagccctcaaatcccccacatggggctcacacgctgaacagtggccctcagcctgggacagctccagccacacagcacagccaggcggggcccgccacgggccaggcctatgggccacacacctacaccgaacctgccaagcccaagaagggccaacagctgtggaaccgcatgaaacgtaagttggcagagctacgtggaggtccgagcggttgggccctcataagagctcctgggtgtgaggcccgtggtgtgtgctgctccttgtttctgggtgttgtgatcgccaggctgggggtggggctgctctggaccaggcacatgtgtgctggagccctcctctagaacctgagcgctcctccctgcatttccacttcctcccgtcccctggggacccctggatgtgccggggaagggcctaaccatagctttcgctgccctcacagccgcccctgggactggaggtctcaagttcaacatccagaagcgaccctttgctgttaccacccagagctttggctccaacgcagagggccagcacagtggttttggcccccagcccaaccctgagaaagttcagaaccacaggtgacgtctgcccccttgccccgtcgcagccccacactctgcactcagcgtctatggtccagtcccactggccagctgcccaccctgagcctcagtgtgcgcctctgaaaagggcagaaggaccctctcttgggggttgctgtgagcactgaaggagacagaaggaaaacttggggactgcgtcccgctgtgtcagctcagagtggcggtggggatggtcttttgagtttgggatcgtctccagctgagcccctcatctgtcctcccgcagcgggtcctctgcccgggggaacctgtctgggaagccggatgactggccccaggacatgaaagagtatgtggagcgctgcttcaccgcctgtgagtcggaggaggacaaggaccgcacggaaaagctgctcaaggaggtgctgcaggcgcggctgcaggacggctcggcctataccattgactggagccgggagcccttgccggggttagtctgggtgggggacataggtgggagggtggtgctgtgagaggcatgggctgggtatggaggtaggagagttgcgggtcccaggtaccaggagctccaaagagaaatgaactggaaagttggatcctggggggatgaagtcctggttggagggaggccggtggggtggggtggggaccatgggtgctggagaggcgtgcattgctcagtggttaagcgcaccctctggagacggaaaacctgggttcgcgtctcatttctgcactgtagtagctgagccgcctggggtaagtgcctttcctttcggaggcgggtcggtaccttgagggaggtggtggcggctgtcctgccagtgtctggcggggttggtgacgccctgccctgctgtattctcaggctgacccgggagcctgtggctgagagccctaagaagaagcggtgggaggccgctagcagccttcaccctcctagaggggcaggctcggcgacaaggggcgggggtgccccgtcccagcgagggacgcccggggctgggggtgccggtcgagcccggggcaacagcttcaccaagtttggcaaccgcaacgtcttcatgaaggacaacagctcttcttccagcacagactcccgctcccgctcctcctccaggtccccgacgcgccacttccgcagaaggtactgaggctcccggctggggctgtgtgtgagggagggggaggcgtttcaggcctgaccctcctgcttcttcctgcagtgactcccactcagactccgacagctcctactcagggaatgagtgtcaccctgtgggccgcaggaacccgccccctaagggccggggcggtcgaggggcccatatggatcggggccgaggcagggcgcagcgtgggaagaggtgagactgtgtgagggctcgacacacgggccagggtggaggagggtactggggacccatgggagaaggaggaggagggccggacaggtggacagccagctgccaaaggggcgaggctgaaggggggctggagacgcctgtcgcgctcactgcccctcatcccttcctaggcacgatctggcgcccaccaagcgcagtcgaaagaagatggcggcgctggagtgtgaggacccggagcgagagctgaagaagcagaagcgggcagcccgcttccagcacggacactcccgccgcctgcgcctcgagcccctggtgctgcagatgagcagcctggagagcagtggggctgaccctgactggcaggagctgcagatcgtgggcacctgccctgacatcaccaagcactacctgcgcctcacctgtgcccccgacccgtccaccgtgcgccctgtggcagtaagtgcccagcagggcagttctgctctgtgaggccgtgctggctcaggacttggggagccaacccagggagggtggcagaggccacacgggggctctggtatggcaggggaagctcggccagagacgcctcggctggtcggcattctgagaggagcgcaaaggcgctctgctgccctggagccccgcgtggcgggtgtgcagcttggccggcgaatcgcttgacctctgggccgtggttcctggcttaggtgacacggagcataaagccttctcccaggcccgtgggctgtggggcgtggggggctgtgtttccagtgtttggcgtagtcactgttctgctgcagaacctgtgaacagccatgtgcttatagggaaatgggtgtggaggtggccactcttaacccatgtcttgtgggtttgttttctctttttttgggagagagtctggctctgtcgcccaagctggagtgcaatggcgtgatcttggctcaccgcagcctccgctccccggcttcaagcgattctcctgcctc[222 bp omitted]taagtggaagccgttggccacgctacctgagttgtactccgagtgtgaattcagttccctttttcaggttttgaaaaagtcgctgtgcatggtcaagtgccactggaaagagaagcaggactacgcgtttgcctgcgagcagatgaagtcgatccggcaggatctgacggtgagactcgcgctgggaggggcctggcctcagccagtcctgcctcccgctccttgtgactcttgttctcgccccgctgccccaggtgcagggcatccgcaccgagttcacggtggaggtgtacgagacccatgcccggatcgccttggagaaggtgagctggcctctgcgggcctccccagcccctttcctgctgccgttctgccctcagcaccctcactctgctctcctccctcggtgcctctgccttccagggtgaccatgaagagtttaaccagtgccagacgcagctcaagtcgctgtacgccgagaacttgcctggcaatgtgggcgagtttactgcctaccgaatcctctactacatcttcaccaagaactcgggaggtgaggcccagtccccaggacagaggccatggtacccagggttgagccctgctgacttcaccctctttgtcttggtgctagacatcaccacggagctggcatacctcacacgagaactgaaggcagatccttgcgtggcccacgccttggcattaaggacagcctgggccctgggcaactaccaccgctttttccggctctactgccatgcaccctgcatgtctggctacctcgtggacaagtttgcagatcgggagcgcaaggtcgccctcaaggccatgatcaaaacgtatgtggtgccaagctcccttctgcctttgctcttcccatccttccgcctcgcaccgcccctcagaccagctcctggccgcaggcctcccccagcccccaacccttgtcctggtccttgcttccccatcatctttctccattcagccctcccctctccagttcctcttgctctccttgttggtcacctctgtgttccgggtcactcctctccctctccccactgttcccagctcactgcctctggggcctcttctccaccccatctgtgtgtctcttcctcctgttctctcctgcctggaccccctagttcactccttgccctgggcttcctcagaaccctgaggtctctgctttctcagcttgtcgctgtgctcccaccatagagaccatctagacagcctctggtctaccaggacaaggcccagtcccactcagctcctttgagagcaccagaaacgcttagggagacacctgtgttgaggccacactgggcgcggtgccagaggcccctggtcaggccatgcccctgcagtgtccttcgttcactagacattgcgcctggcttgctgtgggtggggatgagttgcttgactcatgtttagacgcatggttctgtctggtgattgaggtgcccaggcgacgctgggcaatgtcaagagaggttttcgcttgtcacagcaaggggatgctcttggcatctagtgagtggaggccagggatgctgccctgccactgccattgggcctcagagctcagtcttgccaaggtggagaaattctggtcgaagaggttgaccggtagactgaagaggccttgagagcctggccaggtggctgtccacgtgaggtcatagtcacagcatggaggccttgagagcctggccaggtggccctccacgtgaggtcatggtcacagcatgggggccttgagtgcctggccaggtggccctccacgtgaggtcatggtcacagcatggaggccttgagagcctggccaggtggccctccacgtgaggttgtggtcacagcatgggggccttgagagcctggccaggtggccctccacgtgaggtcatggtcacagcatggaggccttgagagcctggccaggtggccctccgtgtgaggtcatggtcacagcatagtttggagctagggagggactgtcagcctggaggtttggagactcattctggaatctagtgtgggtcaagccaacttcagggagaggctgagccagggtaggagtcacaggagcagacgaggatgtggggtgccgtgcacagagctccatgaccagcttgggaagttagaaggaaggggaggcaggaggctgcttagtctgctgccatgatgggccccatgaatggtggctctcaagcttctgtgctacacaggggtgtgtggttgggcgagtgtccttgttaattgatacctaattggccttggttgggaacatagccatgagtgcccctcgtgggtggggcgccagtctgtcattgacctcattgtgtcagcaccttccccccaaggaggctgaccctgccctgccagctgagactgggagacggagtgggctctgatcccagggcttccaggaaagctctggctttggagcagaagcgggttctaggacttagtgcccctcactcggtgcctgggttcctgtgtgtgtggaaagggtagggctgcaccctgtggaagagggttcagggagctctgaggacctggctcgtgctagatgctcagtcagtagtgtgttttagcagcagccggaagtgactgctttcagtgtgtagtggtgagtgctagctggcacccctgcgcctggcttcccagacactgtaacgcagggcaggggaggcagcgagggctgggtccccacggtggccctggcagccccgccatccccatcccctgccacgtgctgctccctccatctggtccctgcccctcagccagcggaggagcccgctgggcccttccctgcccgtccccgctcctccctggcccccgcacaggtaagtgagggtgaggggggcacaggggactggggtcactaaccccccccgggccccccccgagcccctgaggtggggaggctgggaggcgggtggggagccagcaggcactgtgctgaggaaatcctgtgggcacccgaatgggggggcctccccgctcgtggggccctcccctgccctcccgcccgcccgcctcatcaccttctcctcttgtctccatagcttccgccctgcgctgccagtctcctacctgcaggccgagctggccttcgagggcgaggccgcctgccgggccttcctagagcccctgggcctggcctacacgggcccggacaactccagcatcgactgccgcctcagcctggcgcagctgtcagccttctgagcacccagcgaggaggggcgggggcaggggctgcagcccccagcgctgcctttgcggattctgtttttgagccgtggacttgggttgtaaatttatttgtggggagtgcgctccaggaagagccaccatccctgcccccgttttcccaccggggagtctgtacagagatttttctacgtttttattttttgcctcagagggatgggattggggaggaggggatgggcagcggagggttgggggcatggtctgcaggctcatctgtgtccgcctttcactccactaatgctgtctcagtgttttctctctctctctttcgagcttgcactccggtacccgacccggcgccctggcccatcccatgccggggggccagtggaaagaagacaggccgtccagcccgtgcccgcctgcggcgggggcacccagcaagcccgcccaccgcccgctgcctcacctgcttcgccacagactcttgttcccagccccttggggcctccgtgtttggggtgggggagctgcttagagactgtgcccgtcctcggccccccaccctgaagtgccagcaccaccagcaccagatcctccgccgccacaccgcactgaggacacgccggccgggccgcctcgtctcaagttgtataaagttgtctccgtgtcccctcctccctctgcccccagtgtttcttctgatttttttttcccctttccctccctccctctccgcattcttcccttggttcagcacaggtaaaacggttcccctccctccctgccttcatggatcaccagctcacgtcatgttgccttctcttttctttgtgtgtgtgtttatttaagttatttttcttcctcctctcccttttctttttggccctccctccctccctcttctgccatgtaactggaggatgtgctatgagtttgcaaacagctggactgtcaggctgctttttttccagatgttcctcctctgcctccccttcccctcctctcccctccttttccttccttccttcctttccttggagcactgagcaccatttggaagcttgagagaaaccaaaattaaagagagaaagagagagcgtgcacgctcctgctttgtctttcctgtgtgggctgtttgcatccattgtctcctccagaggtctgggggtgtcactccagggggatctcagccaggggctggaaaggcccccctgtcctccctatacggcacagccagagtgtctgcaggggctggcaccccacttcctggctgagggtgaactccagcttggggaggtggacctgggaaccatggggcaccttggccacggtgaggtgggggtgcagctgccctggagactgtagtgtactcagcccctcggcttccagcctctggctcagcacttgtgccatgctttccagtgtgggagagggtggggcacacagcacatgcgggcccaggaggaccagctttctaaagctcagccgagggggtgcatttagccccggggccaagagggcccgtctcagagctccaatggcagcggcctcctccccagcgcctgccagtcgcagcagggccagggtcaggtgtaggttctgagagggcactaggaagttggcgcagtgtggggccacgtggaccaggtattcctgggccttggtcacttctgcttgtagcccaggctcggtcaccatgagggccacaaaatgtgtggggcgcggttggcaaggggctgcaacactaaggcgggcccttttgtcctcgggccaggccgcaggaccccactcggcttctgtcgtctcagcggagccccccgggactcccagggcctgtgcttccttgccccccagcaatgtggtcctggtggctgctgttggcttcagtgcctcagtcactccggcgaggcgtcctcttggggccagtgttcccaaatcagcagctgtgcccagcgccctctcctgggccgcctccagctctccgggttcctccacgcctggttcctggtgccctgtgcagagcggccttgtgctccctcgcttgggggcagcctgggcctcctgacctgtccccgccagtgtccactcggcaccctctgccccgtgggcgccctcggtgttcggtgcgtccaggatggtgggcccgcgtcccgccgccgagccagagccaaagacgaggtcggtgcgcgaggcgcggtcccacacaaggcggccacggaagcggaagaagcgcacgcggtgctggggcactgccagcacgcccggcccgagcgccgccagcggctggtcccagcaaaaggcgctgaagggctcctcgcgcacacccagaaagcggtcgacgtagcccaccgagaagtcggcggggtcgaggcgcgggtcccagcggatgcgctggatgacgtccgcggctgtgcgcagcggcggcttcttggccccggcctccggctgcgcctcgcggccaggcggcgccggcgccccagggtggggctggcggcagcgggcgccgaagcggcagcggccttccaggaagaagcggcaggccggcgggggcgcgggttccgtggcgggggcttcctgcggcaactccggctctctggccgctgccatgggtgcggggaactggcacgcccgccgcgcagacgaggtcgccccgcacggagggcggctccccttggatgcaccgagcctcacccgacagtggcgtcagcggcccgcgctccggcctagctctggggaccacgccgcgtgccctcgcgaggactctggcccagtccctccttggtggagagcctgacaccgctgctctgggacttcccggctgcgccctcccccagcgccaggaaagcaagctgcgtaaaggctgcggcagtctcggtctcccggagctcttgggagcctggccccgcccctttcccggtgattgatgtgtgctgcctctttctgggtgatttacatgtaatgccccgcccctttcgggatgattacgtgtgcctcgacctttaggtgatttacatgtagtgccccgccccgttcccggtgatttacatgtggtgccccgcccctttcctggtgatttacgagtgccccaccccttttaggtgatttttttttttttttatgtgtgcctctccccttcccaagtgatttacatatgttccccgctcctttcagggtaatttacatgtaatgccccgcccctttccgggtgatttacgagtgcctctccccttctcaagtgatttacatgtgtcccgccccgttccgggtgatttacatgcgtgccctggccctttcccagtgatacttttgtgctgcctctttccgggtgatttacgtgtgtgcctctccccaagtgatttacatgtgtgccctgtccgttttaaggtgatttacatgtggtgccccgcccctttccgggtgatttacctgtgtcccatccctttcccggtgatttacatgtggtgccccgcccctttcccggtgatacctgtgtgccccgcccatgaggggacgtctttaaagaacctggacccgccctcagtccaagtgatttacatttgcggccccgcccctctgggaaacttacgagaacctggcccctcagtccaaatcatttgcatgttcggccccatccctcgggggccttaaagaaccaagatgcctgcggacccttcccccacggagaccaggcccctactgctctaaaagtgttctcagacacttccctctgcagccgctcccagagtaaacggcggctccgccgggtcggagtccacctgaggcgttcagggccagaaagactcctggggctgcagcactctgcagccccgcctcggctggccccgcggtggctgagtctggcccggccccaggaccacgtccggccggcggtggcgcacagtatttgacgaatgggactgcgggagccgccgcctctgcaaggggcaccgcctggccacgccctcgggctctcttaaaggagccgcacccccaccccagggcaatcatcggacccggaccaggcctccgggtgacacatccggctctcagaggcgccaggaccctatcattcatccctttccacgtgcaaagtgaaaagtcagagcccgggcacacaccttggccgtttatgtatacagaagtggggtgccgggcgggaagggcgcggggaatgagggaacctagaggccgatgacgtcgttcagctcgaggtccgcgttggggcggcagcgggcctgggggggctgcgtcccggggcggggttccgcgtcgggcttggcggcagccgcctccgggcgcgccgcgtccatgacgcccagcaccgcgtccagcatggagggccccagatccaggtggaaggacagcagcgggtcggcaggcgagggcgctgcggactgcgggacggcgggcggcggcggggagcgcggggcccccgcggggggcgcccggggctcggggggcggcccgccgccgtggcggctcaggaacgaggtgtccccgaaggcgtcgccgccgcgccccacgtgcagcgtgtgccggaagtcgccgagcggcgcggagatggacagggcgccgcgatcaggccgcttcttgggctgcgcggggcccagctgcttcagcacgggcatctgcgaggggcacgggagggtcagcgcggccccagcccggggctcgcagccacgcgactgctcaaaggacgatgggggacggttcccgttttttgttttttgatttttgtttttgagacggagtctcgcccatgctggagttcaatggcgccatcccggctcaccgcaacctccgcctcccgggttcaggcgattcttcctcctcagtctcccgagtagctgggattacaggcacccgccaccatacccagccaatttttgtatttttgtagagacggggtttcacaatgttggccaggctggtcttgaactcctgacctcaggtgatcaacccgcctcagtctcccaaaatgctgggataacaggcgtgagccaccgcgcccggcctcccgtttcacagatggggtaagatgagactccaggaggtcccatgggcacagctgctgagctcacatttggatctaacctgactccagaatgcctatgaacaccatgctatgccgatcctcctgagagcgaatacttgagccttcctagaggtcaagtaacaaatatttcacaaacccttcagagtgcttcccagacttgactgatagaaaactccagcttgttggcccgggtgcggtggctcactcctgtaatcccagcaccttgggaggccgaggcgggcggatcgcttgaggccaggagttcgagaccagcctgagcaacatggtgaaaccccatctctataaaaaatgcaaaaattagcggggcatggtggcgcatgcctgtaatcccagctaaagtaggagaatcgcttgaaccccggaggcggaggttgcagggagccgagatcgtgtcactgtattggccactgcactccagcctgggcaacaggagtgaaaccctgtctcaataaaaagaaaaagaaaactccagcttgtcaaaaatggaaattcccaggctcctgttctgaagacagggctgactctgtccattaagcaaagcagatcctgcctagagcccaccacgcacacgaggaagaggcccaggtgggctttgcctagggtgcattttatgatttgaattacagtccttggtatctgtgggttccgcatcagcagattcaatcaactgctgataaaaaatactggggaaaaaatacagtaataaaaaatgagtacaagtttcaaacaatataacaattatttgcaaagcatttacattgtattatgcattataagtaatctagagatgatttaaagtgtaggagaggatgtacataggttatatgcaaatactagggcatttatataagagacttaaacatctgcatatttgggtatccataggggtcccagaaccagtcccatcactgctaccaaggggcaactgtacctgatcttttttttttttttttgagacgctaatttttgtatttttagtagagacagggtttcaccatgttggtcaggctggtcttgaactcctgacctcgtgatctgcccgcctcggcctcccgaagtgctgggattacaggcatgagccaccacgcctggccaactgtacctgatcttgagactacaacctaacaatatgatgtcttatgttttctaaaataataatataaattccctagccaggcatggtggctcacacctgtaatcccagcacttttggaggctgaagcgggtggatcacctgaggtcaggactttgagaccagcctgaccaacatggtgaaactccatctctactaaaaaaaaaatacaaaattagctggttgtggtggtgcatgcctgtaatcccagctacttgagaggctgaggcaggagaatcgcttgaacttgggaggcagaggttgtggtgagctgagatcgcgccattgcattccagcctgggtgacagagtatgactctgtctcaaaaaaaaaataaaaagccctatgttaaaaaaaatgggaagaattgcataaatttgaagctggcagcatctgcattgtaaactaggtgctttattgcccatagctgcaccaaattcttttttttttttttttgagacggagtcttgttctgttgcccaggctggggttcaagcgattctcctgcctcagcctcctgagtggctggaattacaggtgtgcgctgccatgccctgcaaatttttgtatttttagtagagatgaggtttcactatgttggccaggctggactcaaactcatgacttcaggtgatccgcctgccttggcctcccaaagtgttgggaatacaggcatgagccaccacgcccggcctaaattcaatatgaaatagaaacgcagccacagagtctgcccatatcctggtcattgcatgttttgtgtggaacttctgggagggactttgatgaccttgtacttttgttttaacagtcactgttatcgcaataataaaaacctatttcagttgaagccctaccctttgccagctgtatgaactgcaataaattactttatttccctgtttacttttctatctgtaagataaataaaataacactaccttcctttcaggatacatagaaaagtctgatcaaagaaaactatacttgtaatagtgctaaccaatgggtaatgctagcgttggggggaaaatatttccctaacaataattgtggaacaaaaattaggttggatagaacactatgagaaagacaaagccgctgacattgttttcaccgtaacaggcaccctgggaagtattggtgataatatggaggaaaatgaaagccaaagggatttaaaataattgtagatggctagattctgaagactggcctacacacacacacacacacacacacacacacactctttacattgatttccatggggaaaccagttttgatttactacctctgcagcatttatcaaatttctctgacctcaacctagatgaataaatatatttttatcgttacctagcacacaatctccactctctccttccccataatggaaataaaaattttaagaaacaagatttgtcttgttttgagacagggtctcactctgtcacccagctggagtgcggtggtgagatcttggctcactgcaacctccgcctcccggactcaagcgatcctcccacctcagactcctgagtagctgggactacaggctcatgctaccatgtagtgttatttttgtatttttttttttttttgtagagatggggtttcaccatgttgcccaggctggtctcaaactcctgagctcaagcaatctgcccgccttggcctcccaaagtgctgagattacaggtgtgtgccagtaagcccggccaatacttacttgtcttacaacgtggtagatactctgattccttccttccttccttccttccttccttccttctttctttcttttcttccctccctccctccttccttccttcctttcttttctttctttctccttccttccttctttctttcttttcttttttgatggagtcttgctctgtcacccaggcaagagtgcaatggcgcgatctcggctcactgcaacctccgcctcccaggttcaagtgattctcctgcctcagcctcccgagtagctgggattataggtgcacaccaccatgcttggctaatttttgtattttatagtagagatggggttt[132 bp omitted]tttatttttaaatgttgagctcagctcattaatgtatcttctggatccacagtttaaaaaaaaaatcctctctagctgctaacagagcctatgatctcagcacttgctctgctgtgggtcagaggtgaaaaagtggaattcagaaagtccattgcacaggtttgaatctggctgtgctgatcgctctgtggctttgagcaacttacttgacctttctgacctcatttccttatcttgaaaatggcatgatattaatctaatacttcccagtccttttgcaagaattggtggagggatatgtccctgcaagtcttggcacagtgcccagcgcacagggaatgttcaattaacatatgctcaatggagtcacacctcggatcattctcccagtgttccagagaaggaaatgggtgatccgagacaggacgtgactgaccaagatcacaaagccagctctagggaactccagtgtctagagctggctgcctccactctctgctgcctcttgactcgtggacagctctcagcccctgcctctggtcagacccagctcccagcatgcacctcgcatcccccttccattgccctatccgttgccaccacttttcagcacctggcaacacacataaagtcttggtttctgacatcacacacatctgggctcaaattttgccatttccttcttgtgcgatcccaaactggcttcctcaacctaaagctcagtttactcctcaaaaaacaggggttggaactcttgtttgtggctgggcgccgtggctcacacctacaatgccagctctttgggaggctgagacagcaggatcacttgagcccaggagtttgagaccagaatgcgcaacaaagtgagatgatctctctacaaaaataaaaataaaaaattagccaggtgctgtgtcatgcacctgcagttccagctacctgggaggctgaaaagggaagatcccttgagcccaggagtttgaggctgcagtgaggtatgatcgtcccaccgcacttcagcctgggcaacagaaagagaccctgtctcaagaagaaaagaaaagaaaaggagagagagagagaaaaagagagagaaggaaaggagggaggagagggagggaaaaaaggaaggaaggaaggaaagagaaagaaagagaaagaaaaagaaaggaaaggaaggagaaagaaagaaaggaaagaaggaaggaaggaaggaaaaagaaagaaaaaaagaaggaaagaaagaaagggaagaaagaaagactacactgagggtgccgaaattttattttccaagtgcttatcctgggccaggcaccagcctgagtgcctccccatgaatgaactaatttatttaatcttcaggacaactccattttacagatgcgcgatggctgagacacagagaagttaagtcacttgccctgggtcacacagtagcaaatgctgcgcgccagatctggaatccagacgaactcttagctccccataggagactacgggcatgccaccccatgagaaaaaaaataataatgttctgatttgatatgaaggcgagagatttcctctgacacccttgattgtcttttttcctctccagtccagaccagaacaacgagttggaagtcgttttcgaatgccacctctgcgccctagctctgagaccctgggtaagtcgcttcacttctgccagcctgggtgtcctcttaaatagaagcctctgacctccctctggttgaattgtgtttaaagcaatgaggtcatgctcggaaaaagtccctcacgctgccagggctcgggacagaggggctgttgtttgtgaccaacgtggaacaggcagaaagcggggcgcgaccgtggagcccggggaggcccgggccgcgcgttctccccccgcctccgcccacccctctctttcctgctggggcagggccacggctccagctgcagggtggcgggcacagctggttcacctctgtcctctctcagtcccggccccgccaggacggaaataacaacccactctagatccggcccaactggttctcagacccgtgggagctgcggtgcagccgggtcgggggaccccagatggggagacccccggcccggcgagggcttcactgcgcgcttcctgcagccacgtggctgcggccgggaattcagcggcccttttccctcccgaccgggacccaggacccctgtccccaccgcgccttacctcgcggtcctcccagagcggggcgggcgcgcgctcacgactccagctctagcccggacccctggttccctggctccgagtccgcctccgtctcctaatccccggcccgcgccttccttcttcctccgggcgggttctcacctggtaaggaaagtgtcatgtggaacccggagggagattcaggagccaggcatccgggtccgtagagccacctcctccttcgccctcaggtcctaggcgtcctagatcttcgctttcttaatcccaccccagacccgaaagtcaggggcccccagccccttcttcctcagacccaggggtcaagaccccccagcccctcctccctcagacccaggagtccagacccccagcccctcctccctcagacccaggagtccagaccccagcccctcctccctcagacccaggagtccagaccccccagcccttcctccctcagacccaggagtccaggcccccagcccctcctccctcagacccaggagtccaggcccccagcccctcctccctcagacccaggagtccagacccccagcccctcctccctcagacccaggagtccaggcccccagcccctcctccctcagacccaggagtccagaccccccagcccctcctccctcagactcatgagtccagacccccagcccctcctccctcagacccaggagtccagacccccagcccctcctccctcagacccaggagtccaggcccccagcccctcctccctcagacccaggagtccagaccccccagcccctcctccctcagactcatgagtccagacccccagcccctcctccctcagacccaggagtccagacccccagcccctcctccctcagacccaggaatccaggccccatcccctcctccctcagacccaggagtcaagaccccccagcccctcctccctcagacccaggagtccagacctccagcccttcctcctccctcagacccaggagtcaagatccccccagcccctcctccctcagacccaggagtccaggcccccagcccctcctccctcagacccaggagtccagacccccagcccctcctccctcagacccaggagtccaggcccccatcccctcctccctcagacccaggagtccaggcccccagcccctcctccctcagacccaggaatccaggccccatcccctcctccctcagacccaggagtccagacccccagcccctcttccctcagactcaggggtccagacccccagccccttcttcctcagacccaggagtcaagaccccccagcccctcctccctcagaccaggagtccaggcccccagcccctcctccctcagacccaggagtcaagaccccccagcccctcctccctcagactcatgagtccagacccccagcccctcctccctcagacccaggagtccagacccccagcccctcctccctcagacccaggagtccaggccccacccctggcaagccctggcataaggcccctttacctgcaccgggagctaaagtgtcagcccctctcgggggccatggcaggagcccaggcagaagcggaatcaccgcccagtccccaggcagagagggttttggcacaggcccctcccaggctttcttatcccccaaaagtttgcctctaggagttaaaggactagaaagcagtggtggaaaagctgaggcccctctgggcggagtgtgggggcgggaggaggccaggactaagtgtgcagggggaactggcagagggggtggggctggacagggcgcgcccccagcctggcccctcccctgcacagcttggaatttcctgaaactggggaagtctggctgtttagaagagtaatttcttccagattgcagctgtatggagagagagagagggagagagagagagagaaagagagaagagaggcaggtcagacagtgaaagcagcaggaggatgaagagcatggagggtgtctgagaggggcagctctggctttgctgcggcgtcccctagatgaacctccctgcctggagccactccgtcatagaaagctcatatctcattctaagcaccagtgtctattgatgacaagagagtgaggtttgagtgttagggcaattccttcagggcggtgcgggcagggagagagagcggagggggagagcagagtcccaaggcaggatgcagctcagtgggaagaaggtgggaagcccaggtgggagtctaggtctgtgggagggaggtggaggcccaggtgggaggctgggtcagcgggagggaggtggagatgcaggttggagcctgggtcagggtcagagggagagggagagggaagcccaggtaggaggcagctcagtgagagaaaggggaggcccaggtgggaggctaggtcagtggttttacccctagctggggctggggttgtagtgctggagagaagacagtcaatttgcgataacaggaagcagccttgagctgggtcttaaggatgagtgagagttgatggagcccaggagaggaggatggatatcggagcagaatggggaagctgggtggggcagagggttctcagacaccaggtggagtttgatttgcctggagaagccagcttgaaagccactgggagcttcagtttgccctgcaggcgtggggggaccgcggaggaatggcagggaaagatccaggtgttagaaagttcccactggggtccccgcaggggatggagtgaagcaggtcaggactcagcacccacagcaaaatttaaggggggagggggcagtggtcaccagaaactcagtaatcagaaaaactatatatatatatatatatatgttacagacttttattaagtattttttattgatgtaaaattcacataacataaaattaaccatcttttttttttctttttttttaattgagacggagttttgttcttgttgcccaggctggagtgcaatggcgcgatctccactcactgcaacctccaccttccaggttcaagcgattctcctgcctcagcctgttgagtagccgggattaccggtgcctgccaccacgcccagctaattttgtatttttagtagagacggggtttctccacgttggtcaggctggtctcgaactcccgacctcaggttatccgcctgcctcggcttccaaagtgctgggattataggtgtgagccactgcatcgggccagaattaaccatcttaaggtgtacagttcagtgacatttagtacattcccaatggaacatacctaattggtacactggtaattgtgtagccatcctttctatcaagttcccaaacattttcatcacccctaaagaaaaccctattaagcggtcactcccatgccccgctctctgcagcccctggaaaccactcccctgttttctgattcatggattacctcttctggacattcgcataaatggaatcacacatcatacagccttacctatctgacttccttcacataagcaggttcatccgtgtgcagcatgtgccagtggttc[133 bp omitted]caacttggtgaaacgctgactctactaaaaaaatacaaaaatcagctgggcgcagtggtgtgtagtctcaggtactcgggaggctgaggcaggatactcgcttgaacgcaggaggcggaggttgcagtgagcccagatcgagccactgcactccagcctggacaacagagcaagactcgctctaaaaaaaaaaaaaaaaaaaaaaaagacgaaaaaaagaaaaagagatatgtatataagagatctatt[137 bp omitted]gtggcgggcgcctgtagtcccagctactcgggaggctgaggcaggagaatggcgtgaacccgggaggcggagcttgcagtgagccgagatcccgccactgcactccagcctgggcgatagagcgagacccaaaaaacaaacaaaccaaaacaacaacaacaacaactaaccatcacgccaggataatctccctgacgtaagatccacaattttaagtgcatctgcagacctattcacgggtcgcagggatttgtgcgtggacatcttgcatgtgcgggggtgggtggggctattctgctaccacagtgcccctcagaggtcaggtcctgggagggggcggggccaaagcagggccagcttcatgggttgcccagtgacccatgctcggagggccctgcacctttctttttttgtttgtttttgagacaaagccttactctgttgctcaggctggagtgtcaaaggcaagatcttggctcactgcaacctctgcctcccgggttccagcaattctcccgcctc[134 bp omitted]cggtctcccaaagtgctggaattaccggcgtgagccactgcacctggcctttttgtttgttttttagacagagtctctatctgttgctcaggctggagtgccaatggtgagatctcagctcactgaaacctccacctcccgggttcaagcgattctcctgcctcagcctcctgagttgctgcaattacaggcatgcgccaccacacctggctaatttttgtgtttttagtagagacggggtttcaccatattggccaggctggtctcgaactcctaacctcaggtgatcggccggccttggcctcccaaagtgctgggatcacaggaatgagacaccgcgcccggccaccacacttcttttaatgctcagttgtcaccaatttgaaattccttacgttttgaagaagggatcctgagttctcatttgcaatagaccccaccaattatgtggctggttctggatggaacagcgggaagggcagaggcctgggagaaagtggccgagaagagcaacgatggagagataaaagggaaaggaactctggatgataccctggcagcagcctgggaaagcaaagagggaggaagagagaggtgtgtcccagaagcctggagtgggagatgcaccgtcccttccttgtggactcaaaagcaggctaagtatgattaaaaaaaaaaaaaaaaagagggagtgaggtccactggactcagtaagaatccagagttcactgggggcctgggtgagagcagacccaaatggggtgggcagggagaggtcagattgcagtggagaaggccagagagagagagattggaggccaggaaaggcggaggggtcagcagataacccagggtgtcctctgtgaagggaaagagagataaggtatctggaagaacagggaaggtcaaagaaaggttttaggttttttggttcatctggatacattcccaactttttttttttttttttttttttctgagacagagtctcagtgtatcacccaggctggagtgcagtggcacaatctcagctcactgcaacctctgcctcccgggttcaagcaattctcctgcctcatccttctgagtagctgggactacaggtgtgtgccagcatgcccagctaactgtgtagagatagggtttcgccatgttgcccaggctggtcttgaactcctagactcaagcaatctacgcgtctcagcttctcaaagtcctgggattacagacctgagccactgtgcccagctggttcctgagactgcaccatgattccttagctgatttcagtgagtacatactgccagtgcccctacataattatacaccagttcctagaatctttttgtaattattcagacttttatagcaatctaatcatcactacccggcaatttgttttcttaagtctagtgctattgagggggttccaacgtttcccttttaaatgtttcagcccctcttctgagtagcagggacatggatggaactttgatcctatcttatccttaaagagcttacaggatattgagaggagaggagggaagttgacatggcaccacccagtggaatgacatagtcagcacagagctcagtgggagcacagaggaagagcgccaggcccatcatgtccagctgcgtaggttgtgcactgcacaactctggggtcatcatatcacaaactgagtgtgaagagccttgtgaggcttccaggacaggtttctaggggtcaccagatgctggtctagatcaggatggaggaatcttgactcctagaaagaggtgggcagggaattgctgaggacgtttgaagtctaatgggctgagccttccctgtggtgagtggcagctcagctttctagaggaagtttgggaagaagaatcctcagtgaaggggtgttctacttggagtgattcgtgtttccttccagctcactcagggtagtcatggcctcttccctttccctggctctcagtctgcatccaccacactgttccccctgctgaactttgcacactccagaccactggaccactgctgcactttctcatttatccagatcattttcaccttctagtaagctgtgaatgtgcttattatgcccaagggttactgtctgtctccttctgcaagaatataggctcctcggctgggcgttctgggtcaggcctgtcatccccagcactttgggaagccgaggtgggcagatcacgaggtcaggagatggagacaatcctggctaatgcgatgaaaccccatctctactaaaaatacaaaaaattagcggggcgtggtgatgcatgcctgtaatcccagctactcgggaggctgaggcaggagaatcgcttgaacccaggaggcggaggttgcagtgagccgagatcgcgccactgcactccagcctgggagacgagcgagactccatctcaaaaaaaaaaaaaaaagaatataagctcctcgatggcaaggatgttttgcatattgatggaccgctagagcctcaaacagtgtctggcacacaggacaggaccaacaaatactgaatgagaaaagtgaatgacagatggaaaagaacagaactaaacagggagtttctccactgggaccacaagagggcactcaagatacgtgtcaaacccttgaagccccaaggtgggtggtctctctgctcctcagcctggaggaccagggacaggtgacctggaccacgtcctttctcctctgtgagcctctatttccccatgtgtagcgtggagatggaaatgcctgaaatacgttcttgtgagaagcaaaaacccaacaacgcatgcacgtgaatgtcttccaaggggttgcacgtgtccaaattcatctaattgtgtacattaagtgagagggttttttagtagaacaattatagctaaacaaagctgctaaaatgtaaataaaataaaaaataaaacttgcattgaacaacaacagagccgttaggctagagcaagaaatctgaaggatggcaatccagaccccaataaatccacaaaggggtgtgtgtgtgtgtgtgtgtgtgtgtgtgtgtgtatgtatttttttttttttttgagacggagtttcactcttgttgcccaggctggagtgcgatggcgcgatctcggataacctcaacctctgcctactggattcaagcaattctcctacctcaggcttccgagtagctgggattacaggcatgtgccatcacgcctggctaatagaaatattaattacatgaagcaaccagtgagcacaatgctatcctgtgaaattattaaaacctaaaactaaatggaagctctggttgaaaagtgcaatacattcctagcaggatgggagacattcagcaaaatcaatcatgtgtctgtatactaatgaacaataatttaaaaacgaagtgaggagaggaattttatttacaaagcctccaaagtaataaaatgagtgggaagaaatttaataaaagaaataaaggacgtgtatactaaaaattacaaaagatgctgagaagttaaagatctaaataaacggagaggctgagcgtggtggctcacgcctgtaatctcagcattttgggaggccaaggcaggcaggttacttgagatcaggagttggagaccagcctggcctacatggggaaactggtctccactaaaaaacaaacaaacaaaaattagccaggcatggtggtgcacacctgtaatcccagctactcaggaggctgaggcaggagaatcgcttgaacctgggaggcacaggttgcagtgagccgagatcgtgccactgcactccagcctggatggcagagccagactccatctcaaaataaataaatacatacgaaaatggagaaacagttcatacattcacaatagcatccaaaataataaatataagaaataaaaattaacaaaaagtgtcatcttgcaaagcagtaacataatatgaaaaaaccccactgaccacatccttcctcattcttagaaagggaattatggtcatagtggttgacctgtggccatgtaattctgtccaaatatccctgaatggtaaatgtgaaaacagtagaatgaattccattgaaaataagaaaacaagaagaaataaagtcagaacgcaaaagttttttttaagggttattgggatggaattttgtttgtttgtttttttgagatgcagacttactctgtcatccaggctggagtgcaatggtgcgatctcagctcactgcattctccaccttccgggttgaagccattctcctgcctcagcctcctgattagctgagattataggcatgtgccaccacgcccggctaatttttgtatttttagtagacggggtttcaccatattggccaggctggtctcaaactcctaacctcaggtgatcggccggccttggcctcccaaagtgctgggatcacaggaatgagccactgtgcctggccaccacgcttctgttaacgctcagctgtcaccaatttgaaattccttacgttttgaagaagggacgtcgagttctcatttgcaatagaccccaccaattatgtggctggttctggatggaacagcgggaagggcagaggcctgggagaaagcggccaagaacagcaacgatggagagataaaagggaaaggaactctggatgataccctggcagcagcctgggaaagccaagagggaggaagagagaggtgtgtcccagaagcctggagtgggagatgcatcgtccctttcttgtggtctcaaaagca[136 bp omitted]ctcatctctactaaaaatacaataattagctgggcgtagtggcgcgcgccaagatggagcttactcgggcggctgaggca[137 bp omitted]atattgatggaccgcgagagcacaggagaggaccaacaaatactgaatgagaagaatgaatggcagatggaaaagaacagaactaaacagggagtttctccactgagaccacaagagggcacccgagatacgcgtcaaaccctcgcagccccaaggtgggtggtctctgctcctcagcctggaggaccagggacaggtgtgaccgggaccacgtcctttctcctctgtgagcctctatttccccatgtgtagcgtggagatggaagtgcctgaaatacgttcttgtgagaagcaaaaagctaacaacacatgcacgtgaatgtcttctaaggggttattgcatacgtccaaattcatctaattgtgtatattaagtgagagggttttttagtggaacaattgtagctaaataaagctgctaaaaagtaaataaaataaaaaatgaaacttgcaatgaacaacagcaacagagtcattacgctagagcaagaaatctgaaggatggcaatctagaccccaataaatccacgaagttagaattttttttttttttttttttttttggtgacggaatttcgctcttgttgcccaggctggcttacaatggtgcaatctcggctcaccgcaactgccgcgtcccgggttcaagcatttctcccatctcagctttctgagtagctgggattacaggcatgtgccatcgctcccggctaacagaaatattaattacatgaaacgaccagtg[225 bp omitted]gaggcaggagaatggcgtgaacccgggaggcggagcttgcagtgagccgagattgcaccactgcactccagcctgggagacagagcgagactccgtctcaaaaaaaacaaaaacaaaacccataaaactaaatgaggctctggagttgaaaagtaccacacattcctagcaggataggagatatattcaccaaaatcaatcatgtgtctgtatacgaacgaacaataatttaaaaatgaaatgaggagagcaatttcatttacaaagcctccaaaataataaaatgaatgggaagaaatgtaataaaagaagtgaaagacgtggatactaaaaattacaaaagatgctgaggagaaattaaagatgtaaataaatggagaggccgagtgcggtggctcatgcctgtaatctcagcactttgggaggctaaggcaggtggattacctgaggtcaggagttctagactagcctggcaaacatggggaaacctgatctatacaaaacaaaacaaaacaaaacaaaacaaaaaacttagctccagcttagagccagactccatcccaaaattaatagataaatacatacatgcatgcatacatgaatggagaaagtttatacattcacaatagcatctgacataataaatgtaagaaataaaatgaataaaaagtgtcatcttgcaaagcagtaaaataagatgaaaaaacctcactgaccacatccttcctcattctcagaaagggaatcacggtcatagtggttgacctgtggccgtgtaattctgtccaaatatccatgaatggtaaatgtgaaaacagtagaatgaattccattgaaaataagaaaacaagaagaaataaagtcagaactcaaaagtgtttttgaagtgttattgggatggggttttttgttttttttttttttttttttttagacggagactcgctgtgtcgccgaggctggagtgcatggtgcgatctcggctcactgaaacctctgcctcctgggttcaagcgattctcctgcttc[131 bp omitted]acctcagcttcccaaaatactggccttacaggcacgagccactgcgcccagcctatttgttattatttgataatatttatattatcacctatcaatttatgatgacaagtgcacttaacataagatctatcttagcaaatttgtaagggtacaaggcagtcttattccctgcacacactaagccgcacaggagactctaggccttcctcatcttgcatgactgaaactcaagagggaaaaatgaggagttatcagtcataggaaagagatcttgataccttgcctgttctttctaagccaatactctcagctccttaaagggggcacttttatttcattttattttttttccctcaggtataaataatttaatttttttcagttataaggctaacacatactcaatttaaaaatccaaataaaaactcctcaaaaaatgaagagccatttaaactcccttgacctaatattaactgctacaaacatcgtgattaatattttcctacaaatctctccttccataaacatgtgtataaacatgcatatgtaatttaacttacatgtggcctctatatacgtgttttttttcctgttttgctcactcaacaaaatcctcggtatcttccatgtcaatgaaagttaaacagcaccatcatttttaatgaccacacagtattccattgcactgggcaggtggggggcagggcattgtttatttaatatttaagtgtccattaagtgatgggcaatatgtttctaattcactgctcttcattctacaagtgtttgctgagcatctattatgtgccaggccctaagtaccagtgataaagtgatgatcaagacagaagagccaagacttccctggccaagtgaagtctccattctaacggcgggagagggacagcgtacaagtcaatgagtggataattagaaaggaggatgaacgtcaagaggaaatgaagacgaatcttcttagcgaaggaatgggtgtcgggctagtggacttctttcaacacagtggtctaggaaggctcttcttgctgagatgatgctgagcagagacctggaggctgtggtgcaaagcaggaggtcggtgcacccaggcagagacgcggagccccgaggcagggagggacctggtgtcttcaaggaacagcaggaatgtcatgtggcctgagggcagggagtgaggggcacagggaccaacgtgaaattggaaagatgagtaagtgtcccgtaggtcacagagtttgggttttgggccatgtgtactatgaagtcactggagatttcaatggtaacaaaacataatctgatttatgcttttaaaggatcactctggggccgggtgcaggggctcaagcctgtaatcccagcactttgggagac[132 bp omitted]ggctgaggcaggagaatcgcttgaacccgggaggtggagggtgcagtgagccaagatcacgccactgcactgcagcctgggcgacagagtgagactccgtctcaaaaaaaaaaaaaaaaaaaaaagaaagattattctggctacaatatggggaggggcagctgagtagcacgaaatgagcgtggagagaccagctaggggatgttccctggacgaggggagagagggtgaacctggcgccgtggtgctggcaagcagtgtctgcatgaggacagattctgaaggtagaacaaggggagagggtgagaaagaggagcagttgaggcgatttctaggactgcagcttgtccaggtggtggacggggaagaaaacgtgggagagccacaattttaactttctcatattaatccttccagtgtttgtttctgggtgaatatgagacaatatgaatgtatattctgattcccccaattcttggcacaatacagatttaatccctaagaatacactctgggatctctccataaagtacataggcgattttctttttattttctttttttgagacaagtctcactctgttgcccatgctggagtgcagtggtgcgatctcagctcactgcaatctccacctcccaggttgaagcaattctcctactcagcctcccgagctgaaatgatgggcgccagccaccaggtccagctaatttttttgtatttttagtagaaacagggttttaccatgttggccaggctggtctcgaactcctggcctcaggtgatctgcccgcatctgccttccaaagtgctgggattacagtcaggagcctggcccatggggcattttcaaatatatttctccctggtcttctaaattccagactgactgatgagaagtctgatgtaattatgataatagaaacttagtacaccattgtgttttttctcccacctttgaggtcttctttattttctttttcctttgagataatgcagcttggtgagtgcggtgagcccttagggaggcattttttctctctccctagcgtcactgctggctggcttcctcctctctgccctttacttcttttttttcattccagctcctcaagttgcatgttcagtgattaattctccaaacttcataatttcttttttttttttttgagatggagtctctgtcacccaggctggagtacggtggcgcgatcttggttcactgcaacctccacctcccgggttcaagcgattctcctgcctcggtctcccaagtagctgggactacaggcgcccgccaccacgcccggctaatttttttagtagagacggggtttggggtttcaccgtgttag[131 bp omitted]aaaaaagtgtgcttaaaacaatccacatttcactttaagtgtgatttttattgcatctaagtttcgatatgaataacattgttcatttctaaatatgtcacaacttctgtgtttttttttttaacagtcactcaaaagttatgcagatttttgttgttgttttaaaaatgtgtgttttttaaacgtttaatttttggtcttttatgtaatttttgcagtcacgaaatatggtttcattatattaaatctttggaatattttgagaccttcttggtggattaagaagtggtcaatttttgtagatttttcatatgttcctgaaaagaatgtgggttctccattgttgctgttttgtacatataaatataacaacacaccaataatgaaaataacaattatgataacaatcattaataatcaatattaggccaggcgcggtggctcacacctgtaatcccagtactttgggaggccgaggcgggcggatcacctgaggtcaggagttcgagaccagcctggccagcatggtgaatccacgtctctactaaaaatacaaaaatagctgggcgtggtggcagaggcctagaagcccagctactcaggaggctgaggcaggagaatcacttgaacctgggaggcagaggttgcagtgagccaagattgtgccactgcactccagcctgggtgacaagagtgaaactccatgtcaaaaaataaataagtaaataataataatcaatattagaacccttagtaatgtcaggctcagtctgactactttttttttatttattattatactttaagttttagggtacatgtgcacattgtgcaggttagttacatatgtatacatgtgccatgctggtgcactgcacccactaactcgtcatctagcattaggactactttttatttttaagaaagcatgcttacttttgcctttcatttttctatatttttaaaaaactttgtaaacatttatggggtacaagtgtaattttgttgcatgtaaagattgcccagtgatgaaatcgggacttccaggttatccattccccaaataatgtgcattgtacccattaagtcattttcttttcttttctttctttctttttttttttttttttgagacagagtcttgctctgtcgtccagggtggagtacaatggtgcaatcttggctcactgcaacctccatctcccgtgttcaagcaattctcctgcctcagcctcctgagtagctgggattgcaggtgtacaccaccacacctggctaattttttgtatttttagtagagacagggtttctccacgttggccaggctggtctcgaactcctgacctcaggtgatctgcccgcctcggcctcccaaaatgctgggattacaagcgtaagccaccacacccggcccccgttcctcattcttagaaagggaatcatggtcattgtggttgacctgtggccgtgtaattctgtccaaatatccctgaatggtaaatgtgaaaacagtagaatgaattccattgaaaataagaagaaataaagtcagaactcaaaagtgtttttgaagtgttattgggatggaacttttttttttttttttttttttttttttttttttttgagacggagactgctctgtcatttaggctggagtgcaatggtgcaatcttggctcactgcaacttctgcctcctgggttcaagcgattctcctgcttc[134 bp omitted]cggcctccaaaaatgctggcattacaggcacgagccactgcgcccagcctatttgttattatttgataatattgatattatcacctatcaatttatgatgacaagtgcacataacataagatctatcttagcaaatttgtaagggtacaaggcagtcttgttccctgcacacactaagccgcacaggagactgtaggccttcctcatcttgcatgactgaaactcaagagggaaaaatgaggaggtaacagtcataggaaagagatcttgataccttgcctgttctttctaagccaataccctcagctccttaaagggggcacttttatttcattttattttttccctcaggtataaataatttaatttttttcagttataaggctaacacatactcaatttaaaaatccaaataaaaacacctcaaaaaatgaagagccatttaaactcccttgacctaatattaattgctacaaacatcttgattaatattttcctacaaatctcttattactaaattactcgatagccagttattaagtaatttcagtctgagtaccattaacataattactcactgaataatcacaacagttccatgagttaggcaccattgcttttttattttacagaggaagaggcaaagaaatagagaggtaaataaacttagtttaaagtgagagagcttataactggcacgaccaaaattaaaatctagagatctggcctctggaattgtactagataaatcaagttatgcactcataactttccccatactccctatatactatgtctattcattcatcattcattcaaaaatatttattatgtactatgtgctagggagtgttccaggagcagggacactacaggaaacactgcaggaaaaaaatctatggtttcatggggatacattgtagtgggaaggcagatagtctacaatattaataagtaaaatacgtgcacatatgctgaagattaatgatatatgctgaagaaagaaaaaaggcagcgagaggtgatacgaaatctggagggagtgttgcaacttcagacaggatggtccaagaaggtctgaaggataaggagatactggggttgacagtgaaggagagggagggatgagccttgtgcctgtctgggtgaagagcattccagtcgagaatggcatgtggatgagccctgaggcagatgcttgcttgatgtttttttaggaatagcaaggagatcactgggactgcatcacagtcagtgaaaggcagagtcggaggagatgctatcaaagtactaacccaagttgggagacagaagacgcagtcgtgtcaatatgactgaggcgggaagtcctggaaagtttctgatcagaagagtggcacagagtggcgaatgtttttattgtattgtgttgttattttactacccaattgcattttattatcagcgtaccttattttatgaaattagacctgcattttggagggagagtctgattttcatgaaggcatgtggtatgcttctgacgataacgccagcattccaggtaagctgccgtcggccctacctccgggacagcttgatgcaagatgctaatcaaattaactccctgagcgtcactgttctcatctgtaaaactggcctaatgatgaaaacatcttcccaaagttgtgagaattaaaggaactacccataagggatactcggagcagtgtctggcatagagcgagagctcagaaaggttatctcttcctttgattgccttgtgcaattctgacttcaggaaggtcttaccgatatgttttagacaaaaatatgatgatgccacgcttaggctcaaaacctgtcccactctcgtgagggtaaaataccaaaactctacttggccttttagagactcctgctcaatcaatgcacatattcttcttcattatttttccatctggagtccactcgacttacaacaggcaaattatctcctgatggggactttcacagaagctgtctcctctgtccacgtctccccccagctgctcttcctgtcgccagctcgtcagtcctcagcccggattccactccacactgcaggtggcttccctggggtcagctctgaggttctctttcttttcttttctttttgtttccctccttccttccttctttccttccttccttcctttctttctctctctctccctcccttcctttccttctttctctctttctcttccttccttccttcctttctttctctctctctccctcccttcctttgcttctttctctctttctctttccttccttccttcctttctttctctctctctccctcccttcctttgcttctttctctttctctttcttccttccttccttgcttccttccttcctttctccctcccttccttcctttctttcctttcttttttctctctctccctcccttcctttgcttctttctctctctctttctctttcttccttccttcctttctctcttccttccttccttcccccgctcccttctctttctttctttctctctctctcttctctttctcccttcctttcctttctttccttctctctttctctctctctccctttccttccttcctcccttcctccctttctctctctcttccttctctttctttctttctttctttctttctttctttctttctttctctctcctctttctctctctttctctttctttctttctttctttctctctctttctctctttctctctctttctctctttctttctttttctttctttctttcttgacagagtctcgctctgtcacccaggatggagtgcagtggtgccatctcggctcactgcaacctccgtcttctgggttcaaatgattctcctgcctcagcctcctgagtagctggggttacaggcgcttgccaccacgcctggctaatttttgtatttttagtaga[143 bp omitted]atttttttttttcctctggagcacttactacatcagcagatatggctctcagtgcaacaaaactcacagctctcttacgtggtgtagagttgtccctggaggcagctgccccatgagggaccctatcttcatccttcttgtacccagctgtggactcctgactaattcccacccttggaatgtgagcagcagtgataagcgacattcagattttttatttaaaaggcacggatgagccctttccattctctcttcctctttcccctcactggtgacagagcactccagggttctaggggaggttggatcccaaaggtggaagaatctgggcacctgagtcacctgatggaggagctccaactgccaaccgggggcccctatatggacgtgtaacacgagtgagtagtgaccattccattgtgacaaactgcagatatttcgaggctaatttgttaaaatctaccgttaatgtgctttatatgacttttttttttttttaagatggagttttgcttttgtcgcccaggctggagtgcaatggtgcaatctcggctcaccacaacctctgcctcccggttcaagcgattctcctgcctcagccttttgagtagctgggattgtaggcatgcaccaccaggcctggctactttttttgtatttttagtagagatggggtttcaccatgttggtgaggctggtcttgaactcctgacctcaagtgatcctcctgcctcagcctcccaaagtgctgggattacaggtgtgagccactgtgcccggcctatatgacatttgaatagtcagaggtgtgccctccacattagactgtgaggtccgttgacttgcgtggctcgtctctgacacagactcaagcccttaatagccgcctggaaatgtacgttttggttcacacaaaaaggaagttgaccaagcccccttgatgaagcctcactggggaggtggcccatcgaaggtcgtatattgtgaatggggcgaaggcagcgtcgccgtctccttcaagtctgacctccaggttggtgttcagattccccctccacaccccacagccgtggttgcccgtctggatttggtgtttcggtcagagatgacgttcgggccagtcgtatggatgatgatgtccaaggagacagttctctcctttaccccagtcacgggaaggaagagctaagcctcatggtgccttcctgggagatacgtggtaagaagccacaagacggtcgggactgagtctctgcgcaccgcatcccgagcctctgccatctgcacagcgaggcgggcgcaggcagcacggtgccccttaccatgctttcttcctggactttcccttgaccagtcttggcatggcaggcgagggaatgagggattggggctgggaggcggggaagacagctctctccctgggcccatgtctggttagatcaatgctgtgggagcttagcgactgaagagggagcagagatgatggcaggaaggcattatctgcccaagcctcaggcttcgcagtccaggttgggaccaagagcttgcagacgtcatcgagtgcagattttgagcgaagtactgagcattgtaaatccagatttctcttccagagctgagtctgggccacaggacctggacacaggagggtcagtctctccggtaatggtgagggtctgtcttcttggagcagcacagcggactcccaccaggacagtggatgctggataccgaagggctgggctcaggacagtggatgctgggtacggaagggctgggatgaggacagtggatgctgggtaccaaagggctgggctcaggacagtggatgctgggtactgaagggctgggctcaggacagtggatgctgggtatggaagggctgggctcaggacagtggatgctgggtaccgaagggctgggctgagggggtcactttggcagtggttctggagtctgaatttctaagggcctggaactcatgagactctagatgctgattcttttctggagaacttctccagagtcaccatcctggcttgtgcagactcaacattccacctgaagagctctgggaacctctggggctgggagccttctgggcctgatgagttctgttgggatggagaagatgatcttgaagttaaagatttcagtgggagtccaggaaaacgtcgcagctgtccatcatacccacaacagcaaacgactcaggactttgtcacggccaccgcggcagccaaaaccacagctgtgatctggggctggactcatacccagaggttgtctgggttcaggttctgcaaccccggttcagagaaagaggaaacggagtgggccgtgtggaccccgtccttcatcgaactccagaactaagagaactgggaggggagaaggccgtcacccttgcatggagctgcctccctcagttctagtggtttctacaactccatgcaggttagctaaggtgtgcatgggttccagaaggaacatggagatgtttctctttgatgttacttgaaactttcgtttggcaagttccttctaagatcaggagattcaatcaccccacatggtccatcagtcagggtatcacaacgtcgtgctccttggctatacagtctcaggtacatttcttcttgagattatttttcacgtgaggcagagatgtgtggctgctcaccagaaaaaaagaattctctacttcctcttacagtgcaagcatttgaatctctgggaggtggctaccctcaccaagggacttttttcctagtctcctttgcatccatgtgtgactgaccataatgactacttatagccaaaaatctggacagaaatgatgtgcgtcaatcaattttgcaagtttacaaatattttctgtgtctcctctttctgtttgaagtatgggacgccattgcccaaggggatgatgtgagcacaatggaagaagcggatgtccctgagtcatcctggggagaaaattcaaattctgcccagagaaaccctcattggtcatttacatgagtgagatgccaaacctcactgtgttaagccatcggtattttttcttttttgagatggagtctcgcactgtcgcccaggctggagtgcagtggcgagatctcggctcactgcaagctctgcctccgaggttcaagcgattctcctgcctcagcctcctgagtagctgggactacaggcacccactatcacgcctggctaattttttgcatttttagtagagatggggtt[137 bp omitted]gtcaccctaactcttacctcacaatagtagctaaacaatttgtgatttgctctttgatcctgtccctatcatcattagactcaagctctgttgagggcaggggctgcatctgttttgttcactcctgaatctcaaacaccaagcagataataagcaattgataaatattggttgatcggcttctgaagaaagaaaattcacacatttatatttagaaaaatttataagggaagtagccgagtggggtggcacacgcctgtcatcccagcattttgggaggttgaggtgggtggatcacctgaggtcaggaattcaagactagcgtggctgacgtggggaaaccccgtctctactaaaaatagaaaaattagctggtcgtggtggcatgtgcctgtaatcccagctactcaggaggctgaggcagaagaatcgcttgaacctgggaggcagaggttgcagtgagctgagatggtgccattgcactctagcctgggtgacaagagcgagactctgtctcaaaaaaaaagaagagagaagtttataggtgaagtggcttgtccgaggtctctgaggctgtgggacaggaagtcacaggagaagctcattctggctgacttcccagctggtgttctgcacctctatcagtatcttaggaaccaagttaccacgacacacctattagagtggccaaattctaaaacatggacaataccacatactggcatactggtgaggatgtggagcaacaggaactctcattgctggtgggattgccaaatggtacagtcactttgggagacagtgcggcaatttcttctaaaactaaatgtagctttgccatgtaatccagcaattgcattccttggtatttacccaaggaagtttgaaatgtatgttcacataaagtctgcatatgaatctttacagtagctttattcataatcgcccaaacttggaagcaaccaagatgcccttcagtaagtgagtggattaactatgtgtcgagacaatggaatattatcccatgctaagaagatacaagctctcaagtcatgaaaagacgtggaggagagttcaacgtatatcactacacgaaataagcctgcccaaatggcgtatccactgtctgattccaactatgtgacattctggaagatgcaaaactatagaaagagtgtaaagttcattggttgccagaataaaaggcttgggcaagaggaaatcatcccagtggaaatggagaaacgcaggaacaaatgaagagcaacagaagaagctaaatatttgggtaaagataggaattttgaatgatgatttcatcattaatgaattaaggaaacattgatgcatgctcattctgtatttgatgacattgcaaacagtgttttgaaaactatactttgcactaaaattaaaattgagcgcctgtaatcccagcactttgggaggccaaggcaggtgaatcacctgaggtcaggagttcgagaccagcctggtcaacatggcgaaaccccgtctctgctagaaatacaaaaattggctgggtgtggtggtgggtgcctgttatcccagctattcaggaggctgaagcaggagaatcacttgaactgtggaggcagaggttgcagtgagccgagatggtgccactgccctctagcctgggtgacagagtgagagtctgtctcaacaacagcaacaacaacaacaaaatgacagcatggctcaagtgtgttggctcacgcctgtaatcctagcactttgggaggacaaggtgggtgagcttgagctcaggagtttgagaccagcctgggcaacaagacaaaaccccatctctatcaaacaaaacaaaacaaaacaaaacaaaacaacaacttgcggagcgtggtggtgtgtgcttgtggtcccagctactcaggaggctgaggtgggaggatctctggaccccaggaagtggaggctgcagtgagctgagattgtgctaatgcactccagcctgggtgacggagcgagaccctgtctcaaataaatgaatgaatgaataaataaataaatcttaaagatgacagcctacatatatatacacacacatgccaaactgatacatcgatgagataacactgtatatacaaaagtgcaagggaaatttgttttttttgagacagagtctcactctgtcgcccagactggagtgcaatggcgcaatctcggctcactgcaacctccacctcctgggttcatgccattctcctgcctcagcctcccgagtagttgttactacaggcgcccgccaccacacccagctaattttctgtatttttagtagagatggggtttca[141 bp omitted]cggtacctgaggtaggagggggaaacaggctggagtatacactacagagatagtcatgcttcatcaagcctctgatttccctggagcatgttgacttcacgttgatttttttttttacatgttctgttaaaaaaatttctttaaattggcctttggaaatttaccagcagtgtgctggtaaagtcttgacaatcagctctctgaaaaaaaaagcaaaaagaaaaacaaaaaacaaccccgacgtgtagcatttgccgatttctctggtgtaaatactcacagcatggctttgacatgagttttacatttggtaaaagcaaattgtgcctactttgaatagaaggattgggacagagatatggttcttgtcaggcactaattagggagtaaggcttgtctaatattgccttggctctcaagcaaaataaaaaagtaacatttgggaatctgtgttgcttcctcagcccatcctgggtaaaatcggagacgtatacagggcagggagaagctgtttatttccatgcctgcggttggagcttcttaaggatttgagctgtgatgctggcacctggcagaccacatcctgtgcggttttcagttttgctctgttcctgaccctggtatagcagaagctttttcacatctatgacacccgctatgtcttggtaaaccctggaagggaaaggaggacaaggttaaaatactgttccgaggacctggtctctccacagcgcaggctggaggtggcagcccgtggaaagccaagttcatccaccatcggagcccaggccaggctgccaaggctaatattcaggacaaagccaggcacaggtcgggaatcctatgaagatgatcatcgtcctgaggtcttccttccagggttgcatccgggccagaagatggaaagagaaatgggtgagtccctgctaccaccccaccctcaggttgcttttttggctgaacaagaagggtcctcccaggcaggaagggtggggcacagaaacgtgagccaatgtggatgacttggggagggctttgcagttgaatctcctgaaaacagcaagaagtacagacctccgggcattctagactcagattctgtagacgcttccctttggccgagccaagccagggttgctcaggaactggggtccttgagattggattagattggacggaacgacacaggattgcaacgtgcagaactgtgaggaccggggtttagcttgagttccccagtctgtccacgaggtccaagcttgagatcattacggcgaccacatctcaggaggaagataggtcagcaatgcagtgatggtgctggaatagttttgaaatatttgaactattctaatgcaaactcttcttttaatgacatttcacgttgcatcttatgtcattttatttatgtagatgttgtctttccacttgacatttaattggtgtttaatttaagttgcaaatattgtgtatgtatctgagtctagtgtgagaatcattactctatgcctgtgcatcccacaccaagtaacttttttttctttttttttttttaagatggagtctcgctctgttgtccaggctggagtgcagtggcatgatctcggctcactgcaagctccgtctcctgggttcaagccattctcctgcctcagcctcctgagtagctgagattataggtgcccgccaccaagcccgggtaatttttgtatttttagtagatagggggtttcatcatgttggccaggctggtcttgaactcctgacctcgtgatccgcccaccttggcctcccgaagtgctgggattacaggtgtgagccactgagccccgtccaagtaatgtttttgaatgagtaagctgtgctgtgctgaatctgtagcatgccttggacatagaccttctccagctgggattgaagtcttagaggaatgcaaaggtggaggggccctttgagaatatggaacgacgacagctctgtatcaccccttttatggaaaaacccagaataactgcccatgtgttctgtgacctttgatgttgattctgtcagcaggaggaatcatctgagtagtgaggaaaatcttggatatgttggtggtttcacagctgtcagaattcactgaatggcacagattcaaagaaggcagtttgtctgccaaggattccttgataaagctgattaaaaatcgctaatgaagacctaaagtgaaaagaggcagggaggagaatctaatacatagaaaccattctacacatgaaagaagagtcagaagcaggaaggtcattctcaggagccgctgtgttttggcctcgtgttcaatgctaagtttcaaaacaaatgtagtattccttgcaaccacgagaagttggtgagtgatttgaaatcattcttatgatgaggcggaagcttttggaatctgttctgtacccctgcactttatccttgtcctcatgatttacaaaaccatgaaaataaagctcagttaattcatcatcatcaaggtgagcaccaggttcagtattcagcttgaggctggggactccatctttctttaacttttgactgaatagccttcacttagtttttatatctcttaggcattaaaaaaattaaaaaaatatatatatatattttgagacggagtctagctctgtcgcccaggctggagtgcagtggcatgatctcggctcactgcaacctccgcctcccgggttcccaccattctctcgcctcagcctcccgagtagctgggactacaggcgcccgccaccacgcccggctaaatttttttgtatttttagtagggacggggtttcaccg[131 bp omitted]ttaattggtttattgttattttttggatggattgctgtcttatggacttagtctaacatattcacagaaagttggattagattggaagaacatacctgggactgcattgcgcagaactctttgagggccagggtttagcttgagttcccctgtccgtccatgagatcccagcttgagatcattacagccaccatgtctcgggaggaggactagtctgcaatgcagtgattatgatggaatgtttcaatgtttttgaaatgtttggactattctgatgcaaaaaactttctttttatttttgagacagagtctcactgtgtcgcctagggtggttttttttttcttttttgaaaccctctgttattaagagataaatatgattcccaggaacattgctctgttctgctttattattattggtcatatctggtcatacgccctgaaaaccctgaaaatgggattgctaaaatcgccttaatctaaactccatttccctcccacttgctccctgggcttggagcacaaccactcaaacagaactggcttttggtcagtaaggaagaagtgagcaacggctgcggtgtagaccctcgtcaatgcctgcgacggttacacctggagacaagctccccagtgtcctcaggagcagcggagatgagaatccatgatagggtgggctctgtccccctcagctccgtgatgccgaaatgcactgctggtcctggtcctgctcctcattccacacccggctgagtgcccatctgaccccagacctcaacgcgaggttctaagcactgtctcctgacccttcaaccccttcgggattttgcatgtgctgttggaccacctcactcccacctggagccaaatgacactgtaggaggaggggaagagaacttatgctagtagagtgtgtgtgtgtgtgtgtgtgtgtgtgtgtgtgaatgtgtgtgtgtattatacataatatatataattacaacattgttaatggggccgggcgcggtggctcacacctgtaatcacagcactttgggaggctgagacgggcagatcacatgaggtcaggagttcaagaccagcctggccaacatggtgaaaccccgtctctactaaaatacaaaaattagccgggcatggtggcgtgcgcctgtagtcccggctactcagcaggctgaggcaagagaattgcttgagcctgggaggcggaggttgcagtgagccaagattgcaccactgcactccagcctgggcaacagagtacgactccatctccacacacacatacacacacacacacacacacacaaattgttaattgtatatgtataattataatagtttatatatattaacaattatatataaacttgcatatatatagtatttgctgtattattatatataaacaattatatatgtaatgactgtataaaatagataaacaattttaactaataatattatattaattatattattattagatgtaataattataattatttatatataatatttattattatgtatcattgttagaacacttaacatgagctctgtcctcttaacaaatttcaagtgaacaagacgttattgctgacgatgggtcgtatgtggtgcagcagatctctaggcctgtttgttaataactccccatttccccctcctcccagcccccgtaaccaccattccctgctgtgatgttgtgactctggtgactttgcagatctcctgtaagtgacatcatgcagtacttggtctctgcatctgcgtcgcttggcgtgatgtcctcaggtttcgtctgtgttgtcgcccatggcagaattttcttccttgtttaaggctgaatagtattcccctgtgtgtgcaccacattttctatatcaattcttctatcaatggacatttagatgattttcacgtcttagctattgcgaatagtgctgcagtgatcaggggagttcagacggctctttgcatactgaatttgtttcttttaaatatagacccagaagtggcattgttggaccatacggtagctctatgtttagttttttgaggaacctccccactgttctctatagtgagtgcacaatttttcagcctcccaaagtgctgggatcacaggcgtgagccaccgcgcccggcgcactgtaggatcttttttaatgcattatataccttgctgagattttagcagagatcacaatattaaaaacttggggaaggatttctatgactcttattttaaatacgaggacatgtcgacttctagttttgtaacatcttgcccaagagcggtggtcgttaacgtgtggagttgggatgacatccaagtcagttggttgcacgacctttattctgtcttgtcccatagatttagaaagaggctgacacatcgggtaactagtttaaggtcatctgatcatgcgggtaagcgacatttttcagaaaccaaggccctccctctcatctcactagtgggaagggtggaaagaacagaacagaaagctctccctcttgtgtgaggcagttgctgtggaagccccacgggcaggaggcccccggccagcacatcctgtctgcttgtgtctgctgcagagttctgggaccggggccatgtctccacacctcactgctctcctgggcctaggtgagtcctggagggagcgggaaggactggaaagggggtcgggaggtctggaaagttccctgctcaagcctgactctagtccagaagattctggggaggaaagtgtcctcctccccccaagactgccctactgctctccctggggcctaagtctgatcagagacaaccttgtcctaaaaacaggggcccgggtgtggggatgaggtcagctttaagaagggctggggggccaggcgcggtgctcacacctgtaatcctagcactttgggaggctgaggcaggtggatcacctgaggtcaggagtttgagaccagcctggccaacgtggtgaaactccatctctactaatacaaaaattagccgggcatggtggcgggcacctgtaatcccagctactcgggaggctgaggcaggagaattgcttgaacccgggaggtggaggttgcagtgagctaagatcgcgccactgcactctagcgtgggcgacaagaacaaaactccgtctccaacaacaccaaaaagaagggctgggggagcaggagcctttttggaagaggagactttgggatttatcttgaaaccattttgcagcaagaaggattacatggagacagtgatgtcgaggagggttggcttggtcgttatgaaatgctgaatgccccccagctccgtcaagcccccttttgacagcagccctgtaaggagactgggcagtgggcatttttctcactggggcttctcttccagtgctctgcctggcccagaccatccacacgcaggagggtaagtcatgccttcgtcccgtcttcccagtcccctctgtcaccccaaaggcagtgctgggtgggagtgatgttgattcttagagggcctggagagatccctttaaatataccctagattgcaaactattccaaatgtaaaatgcataaccctcacccctttctctccttcattctccacctgtcatgttttgcttttcttattttcaaaaatcctatattttattttatttttatttttgagatggagtctcactccatcacccaggctagaatgcagtggcataatctcggctcactgcaacctctgctcccagtttcaagcgattctcctgcctcggcctcctgagtagctgggattacaggcacccaccaccacccctggctaattttttttttttttgtatttttagaagagatggggtttcaccatattggccaggctggtctcgaactccttaccttatgatccgcccgcctcagcctcccacagtgctgggattacaggcatgagccactgtgcccagccaaaaatcttatttttaatcgacaaataattgtatatgtttgtggggcacgatgtgatgttacaacgtatgtaaacattgtggaaagattaaataaggctaaataacatatcaatcacatcacatacttattgtgatgagaacatttaaaacctacttttagcaattttgaaatatataataagttattattaactatagtcagcctgctatgcaatagatctcaaaaacttactcctcctgtttaaccgaaactttgtaccatttgatcagtgtctctcccaagccccccatttcccgactttaatagcatcattctaatctctaactctgtgagatgaccttttttgtttgtttgtttgttttgggatggagtctcactctgtcacccaggctggagtgcaatggcacaatctcggttcaccgcaaactcaacttctcaagttcaagcgattctcctgcctcagcctctcgagtagctgggattacaggtgcatgccaccacgcccagctaatttttgtgtttttagtagagatggggtttcaccatgttggccaggctggtcttgaactcctgacctcaggtgatccacccacctcggccacacaaagtgctgggattacaggtatgagccactgcacccggccgagatgaacttttttagattccacatgcggtatttgtctttctgtacccagcttatttcacttagcataatgtcctctggttcatccatgctgttgtgaatgacagaatgtccttccttttttagggctgaataatattccattgcatatatacaccacattctcctcatccattcatttggtggtggttatataactcaggttatttccaggtcttggcagctgtgagtagcgctgcggtcaccctgggagtgcaggcatcacctccacacaccgatttccacaatgagaattcaaacccaacacaaccaaggctgaacccggcacttttccccagacgagcccacacttcactcggcagcttcttggcggggaacgtgacagtcacaaagggcagactctgaacactcatcctcttctccatcctcctggatgcaccatgtcacccagtcctggtgatttcactctaaatttttctcatctttccctctctcttcatcgacttttcctgcatcacccccaggtgacagcccttctcccctccgtggctccccgaggccggcctcagcctgtccatgccactgctgcctgctcccttcctgaccccagggactggcgatttgcaaaagcacaaccatgaccattgtactttccacagtttttaaattgcattcaaaaattttcatttaatatctcatcgtaagatgaagtttttttcttagagcccttcccctgtttatcttcagatagaatcaacccaggcacctctctttgttctggacatgcccattttcccagccacatcctgtccctgtgacctggggctcactcatctctacattcctccaggttctttcgctttctcaaacactccatatgccgctcaacatggtggttcttctcacatgctgatttttttttttttttttgagatggtgtttcattcttgttgcccaggctggagtgcaatggctcggtcttggcttactgcaacctctgcctccctggttgaagcaattctccctgcctcaacctcccaggtagctaggattacaggtgcctgccaccatgcctggctgatgtttttgtatttttagtagagacggggattcaccatgttgatcaggctggtctcgaactcctgacctcaggtgagccgcccacctcggcctcccaaagtactgggattacaggtgtgagacaccgcgcctggtctgatttttaaaagttaattaattcagtttaaaattgaccgatgaaaattgcatgtatttgtcatgtccaatatgacgttgtggactctgcacacagcgaggaatggctacatcgagctaggcaacgtaggcattcctcctgtgcgaatcatttttttgtggtgagaacgcttagaatcacctggattagcaatgtccaataatgtaatacattgttattaactgtagtcaccgtgttgtacatgatgattcttgaattgatttctcctctctaactaaaaccttgtttcctttgaggaattttcccactttgagtgccctggtgtcccctgtctgctcagctcagggagtttctactcctccctcagctctcagctcagagagagcttcccctgactttgcagaggaggtcagctccaccgcccacctgtcccctagatccctgcacacttacccacaggaaacttattgcagttcgcagctgcagatttggacaattcttcgatcaatatctgtcctcccttctagacgtccacctccaaagggcaggcatcctgtatgtgtttctcacatttgcggaattagcagctcatgaaaagcgtctttaaacagattgataagtaactgagatatggttaaaagaaagaaaaatgaacaaatgggtgggtttggggagatgctggtcaaaggatagaaaatttcgtctagacagggagagtaagttcaggattgtgtaacataatgactagagttaatcacaatatatcatacgcttgaaaatcgctaagagggcagattttaaatgttctcaccacaacaattaactacgcaaagtgaggttatattaattagcttgattcagcgattccacagtgtatacctgtatcaaaacatcatgttgtacaccttaaatacatgcagttttaatttgtcaataataaggaatgaatgaagacgggacgagtgaattgaagccctgccagctctctgccccgctcagggattttgctaattttgacacaaccttcctgtttcagggcgtcaaacccgcccttcctcctccaccccaagcccagttgagataaatggggtttttcaagagccttaataacaaggaaatgcaaattaagctgagaagaaagtagaaactatagaggaaaacccagaggtggtgtctccacagagatctgcattagcaatggggacctgtcacgggctgggcatctgctgtgagcagatcagggctgggggcttcaccctcaccccaccagaccctcaaaggagcctggcaacccccgtcccacactcagtcccacccggggaccggccagtgcccttcaggccccagcacgagccatctccagagccctcgcttccctgtcccttgtccttcacgaatgaccctgtcatccccatcgtgtgcctccctcccaccctctgtccctctagaaagtggccctgggctctgcagcaggcatgaagggctccaggctgctccgacacttcccacgtgaccctgagcaaggcccaagttgtgagcaagtctcagggtcctcactgtcaactgggaaaaaactctgcagtgatgagaatcacatgcacgtagaaggtgcaggaggcgtgggaatgttctaaggttgggctgtggtcgtggctgcataactctataaaattgctaaaatccctgaattgtgatcctaaaatgacgtgtgtggcatggtgacttcctacagtggacgctgagatccttctttgcttccctcttaggggcccttcccagaccctccatctcggctgagccaggcactgtgatctccccggggagccatgtgactttcatgtgccggggcccggttggggttcaaacattccgcctggagagggaggatagagccaagtacaaagatagttataatgtgtttcgacttggtccatctgagtcagaggccagattccacattgactcagtaagtgaaggaaatgccgggctttatcgctgcctctattataagccccctggatggtctgagcacagtgacttcctggagctgctggtgaaaggtgaggacgtcacctgggccctgccccagtctcagctcgaccctcgagcttgtcccgaggtccctggtccctgtcccggctgctgtcctctctctgtggccaccgttgccctcttcctgaccccaagccctcccctccccttcttcctctgcacacacctcccctctgccctcacacctgcttaggtccctggagccctgatctcctctggacgccacagatggcgtggacactcagtcccagcattgggttggctcagagctggctctgcttggctgggtggggagtgggttcccagagattagggggcaacccccctacaaggggatgagtgtcttttcacacaggattgatggtcccatttgttattcctttccactgagccagaacctgccccaggcaatgtgcttctcctggtgtggttcatctcccactgggcagaacacagggtccagggatggcccctgaccagggcgggacagtgctttgggaaaacctttggtatgtgaccacatgcactcctgtgtgtgctcagcccgagatgtcctggagtcaaagtccactggagaggatccaacccatcttcatgtccccccaggacctcagcagtcccctgaggtcaagaagagcttgtggtgggaggagcagagggagtgaccagccccagggagaatggggcaagcagcggggctctccccagcctcctgtcccctgccccgttttctcaggagtctcgagacattgtctgggattgcgtgatggtcatgcggcctttggatgggggctcagggtggaggagggcaggttggttgggacgggttctaaatccttctcctgcccctgtttacagaaagctctggaggcccggactccccggacacagagcccggctcctcagctggtcagtagcagggccctcagctggaggggattacaggggaatctgtgctgcggatgctgttccgggtccagccctctgccctgggcttggagtcaaggtctagggaggccacgggaaggcaccgacacccaccaagctctgggaggtcgctaatgctcacagagaccatagcagcaatggtacagtgattgcaaccttgttccatgccaggaactgtggaaagcacttaatgcaagcaccacttaatgggggaggtactagtctgatcctctaactcctcctcctctctaatatgcaaaacataaattaaagtttcgtgcttaacggcacaaggccatgaaggggcaggggccacccacccgggcagccccaccccagacttccgggctctcccgagctccacgctgcccccttgtgggcgtggcctcaccattcaccccgctctgcacctgatggagggacttagaactcaccttccaacctgggacacccggagagggacggggctgctcctgttggctctgtgatctccgggggaggcctgaacggtggagtaaggtcccttaagaggaggagggctccacagggaggggacgtagctgtgaacggtgaccaggatgaagccatgaggcttcccttccatctggctctgccctggactctgtgatgggagagaagctgcctctggctctgcccctggactctgtgtgatgggagtgaagctgccccaagtccctgggtctcaagttgtccatctccgcctgtgatctgtgaccagaaactgccaggggaggacacggggtcataagccattcgcggccccttccccacctgggtttctatccccagagtacgtccttggacctagacccggtgactgcctgtgaggctcgggctgtgagctcaggcaggtgggaccaggggctgaagccacatggggaggtgggaggagcgatgccgtgctccatccggaccccctcagaggctcctgggctgctggggcacagcgggacatgctcctgagtcccgcagacctggttcaagtccagtgtctggtttttattagccttctgtctgcgggaatatcttgcctctgtttctctccctctcttcttctccttccttctctcttctctcaccttcatgcagtgacatataaaggtcacgagggcagaccctcctgcagccagattgctgggttcatggttcaaatcccggtggttctgccaccccctggctctatgcctgacggtgactcacccaaacctcctgtgtcccaaattcctcatgtgaaacagaggcaatagaagagctgtcctggtagaatcgtttagggcagacttgagttcaggtacacacggcgctgacatcagtgctgattagaaaaccccaaaggagggatgctcctattaatactgaggaagtattttgtcctcacagggactgtgccaggcactgaagcctccggatttgatgcaccatgaatgaggagaaatggcctcccgtcttgtgaacttcaatggggagaaataattagaatgagcaatagaaatgcacagatgcctatacatacatatacaaataaaaagatacgattcgcaatggagaatttcagacctatcatttcaattatattaaatatgttcacgtaatgtattacatatataaggaacataattatataataaaaatatgttaacatatcaccacatatcactataattatattatatgaaagatttatttacaatatatagtacaataaatttcaggtgttattataattaataaacaggtacaaacataaatatatattatctattatttatagattataattataatagaaaaattttatatttaattatatgtttatatgtaatatacattatacattatatattatagtgaatatatgcaacatatattataagtataaatcatatacaattaacattatatacattaaattatgatgtatatgtcaagattacataatttaatatatatttgttatatattatacgtttgcataatacatgatacatataactataaataatataaaaactgtaatattgcacatatataatacatatgtaattttaaatggtggcaaatgttatgaagaccaagcccaggaagtcatggtgtagaataacgggtggtgtcctggaccttggaccgtggaggaggcaggagggaaggacattccaagagagaatgtctgcctttcttgaaggatattgaagatgctgcctcggcagtgggggaggggagggacgctgttcctggaagagggacgcttggctcggaccctgggtttgggggagcccctcaggaccgcatttagccacctgggaattgggtagtggcgtgcactgtgcagaggagggtgaaggttggaggagatgacgggcggcctgcaatgcgccagatgcctgggatctcggctcgctgcaacctccacctcccgggttcaagcgattctcttgcctcagcctgccgagcagctgggactacaggcacgcgccaccacgtcgggctaatttttgtatttttagtagagacggggttccactatgttggccaggctggtctggaactcctgacctcaggtgatccgcccgcgtcagcctcccagagtgctgggattacaggcgtgagccaccgcgcctggccgatatatataatttttaaaacttcaacaagagctcagccagttctttctatggggcaattgctaatttagttctatgcaaatatcgacacattaagtccttgtacacactgtcctcagcgtgccttattattttcccccctttcctcagagaaactatcgactgagacatggagcaacctctccaaggttagccaggtctcaggggcaggggctgcctgaactccaggacaggctgcagctcaccgcgctgggaggtttctgccctgccatactctcaaattttaattt[274 bp omitted]actgctgggattacaagcgtgagccaccgcgcccggccgagctttaattttctatttgtgctcaagtttaatttccttccaggatctgtttcctagacctgtgctctttatttttgccttcttctgttacatgatgactgattttctctgttctttatgtgggacacattctccctgctctctctgtgtgtgtgtgtggtgtgcgtgtctctgcatctctgtatctctgtctttcttctctctggttgtttttcaactattagcgcagtgtcttctcccatcacgtcttgtttgtttggcttggaccctgaggtggacaggtgggtaaatgaggccttcagcaaagggtggcagcttgaccttagcagaggaggctgtgtgaatttttctaccccttgcagagcacaggagggctgagccgacccccgtacctgctccagtgtaaggaagtccaggatgtgcaggcagccaggccacagtgaaaagcaggacagtcatggtttaagggaaattaaacaaaagcacccaactgttcttttgtggggattggtggaaagaggatgggtccaggcagaggacagaaaagcagaggcagcgactcatcttttcttctggatcctccaacccgcccaatgcaggggctgggactcagcgcgatgggtctggggacactgctgtatggagaggatgtccctcctgctccaccgcccccaagcccacctggaggaggagccacgtttaacacacccggtggtgcagtgtggccaggcagagagggaaggcccaccctgtgatcatgaccgcaccctaattcccctgaggagtgtcctgggggtgaacatcagggggctgcagtggggcccaacatggaggggaggggaggcctcacttgggccagatggggcagcagcagatactcacaaatgtccctgaatccctgggactaagtggacattgagtcaacaagaagggtccccaggccttgagggagcagagagaggaaggaaggacaaatggctatcaggtacagacatcagtgggatccccccggcaatctagtaagcaaaccccacagaccccagtcagctcaggcccaaagcccaaaggccagcaggagggcacagaaccactgtcccaagcatcacctttgaaccctgcttcctccatattgggcactaccctgggaaggagctcaggagagagggaaagtgggaaggggaaatcatactaaagaaagtgaaaaatgattgtgaagggctgagtttaaactccagggagtgtgtgcgtgttcaccaggggcagcttatgaggaagagtgacatcaatgatagaagacgtatttctttttttcttttctttcttttctttttttttttttttgagacggagtcttgctctgtcgcccaggctggagtgcagtggcacaatctcggctcactgcaagctccgctcccaggttcccaccattctcctgcctcagcctcccgagtagctgggactacaggcacccaccacc[176 bp omitted]ctgatctgttgcacacacacacgcgaagccacaccaacacatacacggatggaatcctcactggcgtgcaatgctatttaactcctcaggtattaactacctaaggaaagaaatgtaattcattggatttttgatgatgcttcagtgaaataaaccagagtctgttccatcgaaaatgccaggtaaacgttgactatttttatttttctctgttttatcatgcatatataacaggcttccccccccaacagggtcaatattttacgggcccttttataaactgcttgttctgttaaaaattcaccagaagcatccctccttctgttgcacgtccgcaatgagccctcagtttgtagcacatcccacactgcacaccctcctgaaaaatgcttggtttgtgtgataacatgccctgtccctttctctctccaccaggcttttccatgtggagaaacgtcacttaaaatgtttcacatttgatagggagtcagtggcgctatgtatggactgtgcttcagtttctttgcatgtggtttttttttttttttttttttttttttttttttttttttgagacggagtcttgctctgtcacccaggctggagtgcagtgacatgatcttggctcattgcaacctccacctcccaggttcaagcgattctcctgcctcagcctcctgagtagagtagctgggattacaggcatgtgtcaccacacctggctaatttttgtatttttagtagagatggggtttcatcctgttgaccaggctggtctcgaactcctgacctcaagtgatctgccccaccttggcctcccaaagtgctaggattacaggcgagagtcactgtgcctggccaaaatgtggagaattttaataggtattttgttgccgaccttttcttcctgtttccttggggattcgggtggttactttcacacagaaagaaaacagcttttcctgaggacagtggttcccaccatggaactgagacacgctgagcgtgtgagagatgcccagagtggcagtcatggcatcctgatctgcagaccacttctcggcttctgtccagagcagaggccaggtgtctggacttccctttctcagaccgttggaccagctgggcagggtgttgaagaaaaaaaaaatccagtgtcacttgttgaggcacaataaggaggacattattcaggactattgctgtaggtacagggaccatggtgatggaattgcacagtgtgggaaagagactgggctcaactctgagtagaacaggaaaagtgggaatttgtagccttggagcagggtgagcggggtcagtcagtggaaaattgctaagagaagtcctcaggggttaagaagaccctggctaaaccgacccagcaggattcttgctgaaggcaggccaaggcggccagacatcacctgaggctgatggagaatgaaggttcttacctgtgaaccatctgattaagggtgatcagatatctagagttaaactgactctgcaggattctttcttaagtaagaattggaaaagagttgcaattcttactaaaattgggcaaagcagagataaacatggaagcccagaggtcagggctcgttggaaaagagctcagaggagcctgagtcgagcatggtcaaggagatcgtctatctgaagggagaacgtagagcctgggcaggtgttggggaggagggtttagaccaagaatcacaaagctcatgggccttgcttcatggagggatcacagacccaagagcttcattctcttcttcttgaagaaatgtgaccactggggctgggtctctcctgggcttgagagtgaggtctggggaaacccacaggtctgtgcccttggagaggcttagcccacctgttcccaggaggacaccacagccaacagtgagaacctgtcctccatctctatcagactacaccttgctgaccccaagaaccagaagggagtgtcttcccctaggaccccagctctgctgggagacctctcgtacccatggcctctgccagtcactctcacctgtgaccctaaaaagtctcaagcccttctctgcatgttcctaattcttggtccatcctatcctcttggggatggccctttgcatggaacatcactgcaggcctcaggaaccccaggacagagcagagtcctccgcttcctccatcctgtgagcaggtgacttgggatttcagatgaggctggcagtgactggagatttcggaatctgacagatgcttttaactacctggaaggactgtgccctaagagacagaagatatgagaagcatgagaatccactgaaatgtaaagggctttagagctacaagagaagctctaaaaagacaaggaaatgcagaaagcccccagttcctcagtggcttgggagggaggtgcagacttcctgactatacaggagatgatgggaagactcattacggatgggggctaggagaccacccttccttagttacgtgttttgtgctgtgtcttgacaagagagatgaatcagggtcctaggtgagaattcaccaccatccaagacctaaatgggtgtgtgtagactctgaagtccaagaagttctgccgaccgacgtctgcacaaaccactctcagcaaaacaaccactagagtaatccagggtttcagaaagagttggtcttttccaatctagcggagaatatcttctcccagtgagagagggacacacacacacacacacacacacacatacacacacagtattggctctgttttctctgaagtgtgtggcctttttttttttaaggtgttgtagattacttggaactaaatagaggtgatggttgaagaagattatgaatgcaccaaattccactgatttgtacacttttacatagttaatggttagttttatgtttgcgtactttattacaataaaaagtaatgatatagtatttgtagagcaagtagcaaagtcccaatatgagtagaatcttatcatgctcataatttatacacacagtgcattgaaataagacactattttcggacaggcgcggtggctcatgcctgtaatcccagcactttgggaggctgaagcgggaggatcacaaggttaggagtttgagacaagcctgactaacatggtgaaactctgtcttcactaaaaatacaaaaattagccgggcatggtggcgtgagcctgtaatcccatctactcaggaggctgaggcaggaaaatcacttgaaccagggaggcggaggttgcagtgagccgagatcatgccattgcactccagcctgcgtgacagagtgagactccatctcaaaaaaaaaaaacaaaacaaaacactattttctattaccaaggcaaggccagagtgattccctttttgcttcctctctgcccacgatggtgtacagtagaaaaaaaaatggccttatccagatgtcaagattccatagttcatatgaacatcatctacaccttgagcttctccacctcttgctaaattctgactcctattccaaatgttcccaatatatctggccctatatctagacaccattcctatttcccctgtctggatgcagtccaaggagagtggttcttgcggttactgtttacagtactgactgggatgctggcgcctgtctgtagtttcagcaccatggccagcgtccaggaagccacacagctttctccattgtcgtctcttagttgatcatttgcatatgctgagtccctatcttgggactctgaaatagagtcttcctggaaaaatctaatcagtaacttttttttcagggcaatattcaggcattagggtaaattggaaaaagaggatgccagttgttaaggcgatgtttttggaaaaaaaataacccttacattccatggattctgcaagcaagtagaatggcctgttgtggggtcgggggtgggggagggggagggacagcattaggagatatacctagtgtaaatgacgagttaatgggtgcagcacaccaacatggcacatgtatacatatgtaacaaacctgcacattgtgcacatgtacactagaccttaaagtatatacattaaaaaaaagctcagaatgtgggctcccacactcatcaggacaactagaataatccagggtgtcagaaagagttggttctctccaatctagctgagaatatctcttcccggactttcaagataccagctattgggtaatggccaaacgacaacaggctttaaatcacaccaaactgctttcaaaacctgaatctgaccttgctatctttatgtgcttgggagagtcacattacctgtctaagactcactttgcttttccataaaatggcactaataatgctgtctgctttgtaagcatgtttggaagacggatgatcggggattattatattctgcctctctgtttagctaggagggaaggctccggagccaggaaggctgggatatgatcattgctttgtctctgaaaactatgagatttaggaaaattacccacttgactcaattttgtcatttataaaatgagggcaatgccagtacctaccttatatagagttttggtggagaacacatagttactgcatgtgacgtgcaaagtaaactctgaacatgttgttagactcactcaataatgtgggctattgtgatcactactataatgttactctaaaaacgatgataatattatcatagttttgtggctacacagagcctgataaactttgctcagtaataatacctgtttttatgaatcattgttaacattttcttgaaggtccttggacatctgacatattccctgatttactttccaaagttctgggctccccatctcaagcttacagacttagcctggacggatgccggcatttgtttttttcaaatatttactcagcaacatctcctgggactcgggactctgatgtgccacatcctgtataggaaacaggtgatgtggaaatgagtcagactcagctcctgcccctgacagactctgacagagaaatctgcaatgcactgataagactctgctaccagaagcttaggcgctgctgaaacgcaaaagagataccaatttatcttttcctaaggagtgaaggaaagccccttggccatgaaaacccctcagatggtaccaaaaatatagacaattgatccagagaggaaaagaggggaaggaaagagtagagagcatcctcaaatgagagagcagtgtattcggaagcatcagtagctatgagaagctacaggctcaaacaaggggaaagatttaggaggagaattattctcaattgctggagtgaggggttgagccaaataggttaaattaaaattttcattgttgaccatggaagggctgcgcactggggcaataggagaaacctccaggagtgttcagggaaagaaagcaattaaacgtggatcatgttttttgttgttgtttttgttttttgtttttttttctgagatgaagtctcgctttgtcgcccaggctggagtgccatggtgtgatcttggctcactgcaacctccacctcccgggttcaagtgattctcctgcctcagcttctggagtagctgggattacagtcatgcaccacaa[134 bp omitted]gcctggccagataaatttttaaaagagagggagatttggctgggcatagtggctcacgtctgtaatcccagcactttgagagactgaggtgggtggatcacctgaggtcaggagttcgagaacagcctggccaacatggctaaactccatctctactaaaaatacaaaaattagccaagcatagtggcaggtgcctgtaaccctagctactcaggaggttgaggcagacgaatcgcttgaacccgggaggcagaggttgcagtgagccgagatcacaccactgcactccagcctgcaatagagagagactccatctcaaaaaaataaaataaaataagaagatgactgtgggaatggtaaactgatttccaggatgggatacccaaaaggcactgcagacctggggagagggtagcagcaatattgactttcattgtggacacggcgagtagaaaagtcctgtagggaactctataggttcttgcctaagggaagagtcacaaagctgttggacagaaatggaaacactaccaaaagcatcaacggagaagagaaaaaggaaaagagtacaagggatggggatagggtagaaaaggatgattctcaacaagtcaggatttctcctacccaaacatctatggtatacacctgccactccttgccaatacttttgtcattatatatatatttgagacagagtcttgccctgtcgcccaggttggagtgcaatggcgcaatctcggctcactgcagcctccaactcccgggttcaagtgattctcctgcctcagcctcccgagtagctgggattacagtcacccaccaccacaccctgctaatttttgtatttctttatttatttttttagtagagacagggtttcaccatattggccaggctggtctccaactcctgaccttgtgatccacccaccttggcctcccaaagtcctgggattacaggcgtgagccactgcgcctggcctacaaatgtgttaatatctcagggtgtgtgtgtgtgtctggggagggccaggtggttttctgtgctgagtttgctctgtagggaagagctgtgttttctggggctgtagagtttagctcagtcctgatcatcagcaatacgaatgtcaaacaggaaggcttgtgtcttatttggatgaagatgcagacctgtggaaggattttgatcagggccagaaacaggaaagtttggggctatgagaattaatagacatcagcagcagtgagggtctggagtagggggctgggaggaggctgatgtggtgacagagacacgatgtcttcagtctccagctgagcttggactgtggggatgggtcaggggacgtgggtgaggagggactcggggaaagagctgtttggatttgttcacggtgtggggagcagaagagcgtgaggaactgagagttgctccagtctctgccttggttcactggaggagccgatggggctgtctcgggatggatgaccccaggagaagcagcaggcaggggaggtgttgataagatggataactggcctcagagaaagcagagcctccctccaagcccgagtgtgtggttttgttcctcccaaacacttccttcatctgacttcctttgttctataattagcagcaccttctcttcattcttctctttcaaaacctctgattcatttctacctcctcactacagtgtgttttctgaaagttctcaaagcacagactaattcccattttccaggagaaccacacatttcatatggcttcaagccagacaatgggaatccacgcagagagaacatgcacgcacacaaacaggaaggacgcagacgggctttgggggtgacgagggacagcttcaccctgaggtctcaggcgaggggtgaggaaggagactcatgtgaactcctctgtctctgctctcaggcttgttcacaaaaccctgcatctcagcgcacccaagccccctggtgcacgcaagagccagcgtgagcctgcgctgtcactcagagctggcctttgatgaatttatcttatacaaagaggggcacacacaacattcccagcagtatggtaggatgatccaggctggggatcactccttcaaggctgtcttttccatgggtcctataacgcctgcccgtgcagaagcctataggtgctgtggctgtttcagtcactcctgctatgagtggtcggctcccagtgaccccctggacattgtgatcacaggtgagtgtggctggaccattcatggtcttttggtgcccaggaaactccccagggtgatgtggttgttgatcaaaccgccagtagaggaagaaaaataccagaacatagaaacaccaagtaacttattagagggccagaggaggggatgaaggaaagggggagaaacagagaacttgtgatagttaaagagaaaacaagttagacagtgacagagaatgtgaaacagatattgagagagattcgcaaacatagacaatgcctcctcctgacctctcacctgtgtcctcaatgcctcctcctgacctctcacctgtgtcctcagtgcatcctcctgacctctcacctgtgtcttcagtgcctcctcctgacctctcacctgtgtcctcagtgcctcctcctgaccactcacctgtgtcctcaaacatcacttcctcatgactccctttccgcaacagaagagctatgccagtctattttctaatcacccacagccaaggaatgattccacatacgaatgtcatagtgcgtagttacctgttttgtagttatttctagacatctatcacatcccctagactagcagggctcacaggacaggatccatgtcagtgaagcgtatgctttatttttcattcttggttaattgtatgaaataaggttgacatttatagacatatgctggcagaatggatggaagcatggatggactataaatggacagacacagagggaagagttgatgatgtattcagtattcaaatgcacacttaaaatctgtcgtatatcaagccagcaacctctcctgctgctttcccccttgaattctgggatattcagctctgctctcagtttcctggctcagggatttcctccttgtccattttgcccaggtgagacgcacacagagatcacaaactcagatcagcctgacaaatcctaaagcaaaatcatacctgcagcattgactatataatccactggaccccatgcaaaatgaaaatagagggccccatgttcaaacatcaagatgtcaacacgagggcattaaactcagcttggaactctgatggcacggctcctggacagtgaagccagccctgcacagagacataagcaattgggggattgcacacagcatataccaggcacctcgagatcccagagctgcatgcacccaacacacgccaggtattccagatgcatcagacagaaagtgcccctggaggtgatggttgcagatctgggggcctccaaagcccacttcgccactctctgcttcagtcgtcatactggacatggactgtgtccctgcacagaccctgtgtatacctagtccgttcactgcactgcagggactcagacttggtaactgagtgtatgaatgtgtatgaatgaaaatagcatgttgattgtgttggattatctttacttaacaaagtggcatgcagttttatgaagttttaaatggaataaatagtgacgtcttcacataagcctccttaggaagtgactaatatcacccacgcttacaggatgaggaggttgagcttcacagcttgtgcagcaggctgagagtcacggagcaaacaggccgcagatcctggaatgagcccaggctggcagaggtcagaacccagtcttgtgaccacaatgctttgccacctgtgttagcttcctggggctgtcctaacaaagtcctgcaatctgcgtggcttaacaccacaaaatcaattcacttataatcctgggaagtagaagtttgcaagtaaggtgtcaaggaggccatgcccactctgtaggttctaggaaagaatccttccacatcccccccaccttttttttttttttgagacagagtcttgctctgtcacccagatctgtggagcgatcttctctcactgcaacctgcacatcctgggttcaagtgattctcatgcctcagcctcccgagtagctgggactacaggtgtgcaccaccacacctggctaatttttgtatttttttaatttaatttttttttgagagagagtttcactcttggcatccaggctggaatgcaatggtgagatcttggctcactgcaacctctgcctcctgggttcaagtgattctcctgcctcagcctcccaagcagctgggactacaggcatgcgccatcatgcccagctaatttttgtatttttagtagagatggggtttcaccagctggttttggccaggctggtttcaaacacgtgatgtcaagtgatctgcccaccttggcctcccaaagtgctggcattacaggtgtgagacacttcctggccccaaatcattcattcattcatttattcattcttcattgagtcattcggtaattccccgtatagttactaatcactaaatgtgtgccaagtacggggctcctcacttcgtacaattacggtatattgtagacacaaagagtgtcttcatggtgggaactggaggagaaacaatgaaaaagtggagaaatagaaataaatgacatcaatgataaattttatgaaagaaaatgttaaaactaaaccatgaaaactaatacagaagcctacttgcctacggtggtaaggaaagaaatcttggagctggtgatatttgcactcaacagtgatatgaggtgtggggagagggatggaagttgagatagagagaagagcacgtgcaaaagtcctggggtgagggaaatgtgaaggatccatttcttttgctgtaaataagacaacatactgtcctgagtgtacgtgggtatttataaagtaataatatttatctaaaacttggagtgaagtatctgaatgaacgtatgcttcgagtaagggttataaaccattgtgtctatttatgtacagatgagaataccacatattccagccctgccgtgaaggaaaggtggaatcagagatgaggaatcttcagctcagataggagacacacagaaaggtttgcatgtggaagtgccagcctgtcaacctctccagaggctccagaagtgaggccagaattttgatgataggagatagactttggaggtcatcacccacatcccctgtcatggtcactgtcattgtccctattccaggcagtcagaaggaaaaatgaaggatgaacataatgcgttgggttcaatgggccagggctggaagcagccacctctcctgggcaaagcctcaatttcacagatcttctcaggtgagaattgaatcactgcaaatgaaaagcttgcccttgggttgtgtcgacaggtttgaagcaggcagggaaatctattcatggcagagatataaacggtccctttattctatgggtggatgtggatcaagaattctagacacacagggtgaagcctgtgtccaaactaataggaccttcacactgttttcagcatggagagctcacaagtattggaggattgggagaatggggtgtctagaataacgtaaagcaacaggaagcttgattcacccagatgggtaacctgagcatatgccctcctatggatcagctcaggaattccacgctggcttcaacacaaaggccttttcacccgtgcttgctaacattcagattcccattaaagatgtgtgtttttaattaatcatttcaaataaaaccttgacattattttgcattaatttttcatgtttaagtaattggtttaatcgagaaacggaagtgcatgaggcagatactaagttagttaggtcattgcaaatatttagttggacttttatcatccctcggcctcagattttctgaagcctctgatgccgttcacccctctgacctacgtgaaagtagctcttatcttgttcaccttttggaccttgtttcaaaagtaatgatagaaatgagcagtccagttgagaaaacaagatactctgggagggtaggtgctgaaaattcttggagaaaccaaagctgaagacaagactctcaatcaattgatcttggcaaggaattgtgttttctctcttcactgtttaatactggtcaatacaattatggatgttttgatctggagtgattctttgttaacatctctcgtattcatccagagaatgtaaataagggcataaaacaaatgtaaatattcctatgataaaataattattctgctatggagaatattggatcttgctccttagcgtgggttatttgggtgaaacactgagaaacatgaatgtcaaagagtcctacactgtgaaaccccgtctctactaaaaatacacacacacacactcacacacacaaatttgccgggcgtggtggtgggcgcctgtagtcccagctactcagaaggctgaggcaggagaatggtgtgaacccgggaggcggagcttgcagtgagccgagatcgcgccactgcactccagcctgggggacagagtgagactccgtctcaaaaaaaaacaaaaacaaaaacaaaaaaacagtcctaagctttctaggaccaaggaagcagctactcactcgcaatcgctagagtgttcccatcttccaacacccaccttgattttctctagtccagcaatgagtcaggtctcagcatggtcgaagcagggaaggagcatctcatgctgctttccttgtggtcataccttgccaatgccacttccagaggcaggtttttcattccttctttcagctttcagggtctggatactctgaggacactggttttgcctctgtgcattgatgaatgcctccgttaatctgcaagtgaagagtaaggaaattgcttttcacacattacttagagggcttttggtactgtcagcgaaggacacttgtctgatgatatcgatgtcaaccacaacttgcaaaatatcccatagactcaaattttaggaaactattctaaccaaagctcatcatctgaaagctgttgctctatgcacagggtcctgggcttctctgtgtgtggctcttccccccacacaggagacccatcctctcgtgagatcttcaccctgcgcaggagacccgtcctctcccgagatcttcgccccgcgcgggagatccggcctctcccgagatcttcaccccacgtaggagacaggtcctctcgcgagatcatcaccccatgcaggagacccgtcctctcgcgaaatctgcacccctagcatgagattccctcctatcgcgagatcttcacccaactcaagagacccgtcctctcccgagatcttcaaggcacgcggaagacccgtcctctcgcgagatcttccatgcgatggctcctgcctctgctcatatccaaactcctcctcagccaggtgtctgatgactccactgccatcatcccagaaatttgttcctagagaacacaaacaaatttcttctctattcttcataccaaagaaaatactatgatatttctgcatgtttatattattgttaagtgaacggcagtaattgcttatcttccaaaacgaagagctgagtaatgatatatctttaaactccatccttttgacagtgattgaaatggacaaaacagtagaaagtagagctgatatgtgtgatcacttttaatgacacagattaacagtgaaaaccacaaagacctgtggtacttgtatctaggtagtagaacattggcctgtaaacacagcacttcgggaggccgaggcaggtggattgcctgaggtcaggagttcgacaccagcctgcacaacatggcgaaaccccgtgtctactaatgatacaaaaaattagctgggcatggtggtgcaaacctgtaatcccagctactcgggaggctgccagatccagccacgagacacctttcaaaaaaaaaaaagaacttggtgtataagataatttttacactgccataaagaactacctgagactgggtaatttatgaagaagagaggtttaattgactcacagttccacagacttaacaggaagcatgactgggaggcctcaggaaacttacaatcatggcggatgttgaaggggaagcggggaccttcttctcatggctgcaggataaagagagaaccaggggagacgtgtcacactttcaaaccaccagctcttgtgagaactcatgatcatgagaacagcaagtgagaaatctgcccccatgatccaatcatctctcactgggcccccctccaatacatggaaactgcaattctagatgagatttgggaggggacatagccaaatcatatcattttgcccctggcccctcccaaatctcgtgaccttctcacatttcaaaaccaatcatgccttcccaacagttcccaaagtcttagctcattccagcatgaattcacaagtccaagtccaaagtctcatctaagacaaggcaagtctcttccccgtataagcctgtaaaattaaaaacaagttagctacttccaagatacaatggggatataggcactgggtgaatgtttccattccaaatgggagaaattatccaaagccaaggggccacaggccgtgtggtgatgggtttgtaggtgcagcaaaccaccagggcacaagtttacttatgtggcaaacctgcacgtcctggacatgtaccctggaacttaaaataaacaaaataacattgattataaaaagatatgaggcctagagaatcccaggaatacctccgccgaaccccacaacccacaaccccagtgtcactaggttgctgggacaacactggcactacctgcctcaaaacttattgtgaagtgaaacattaaatgtctttattattaaaacaaaaggagagaatgacaatgatcgtaacaaatactttcaagctttatggacatatacaaattgtacatatttggtgggtggaatatgatgttttgatgtatgtgaaataattaccacaatcgagctaacaagaaagtgtctctcccctcacagggttatcatttttgtcttcatttttttttatgtggtgagaatatgtaagacgtatcctgttagcaaatttcaggtgtgtaatacagtctttttacactatagtcaggcgggttttgagtgtgggaaatgaggacacgttggtcaaaggctacaaagtttggttatgcaggatgaaaatgttctagagatctaatgtaagcatggtgacgatagctcacagagcttccgatggaagaggctattttgtgtgcagattttgccttgctccaagatggcaaaactgcagaagaaattgtccaatgggcagaagaaactggaggtttattgggatgtgttgacttccctccaccaattgaagataagagatgaccagaattcaaggtgctgcctacttcacgttagtattgaggaaggagctcattcctcttaacaatgaagagtaatcagattttaaactgtcatggttgctgtaaagaaaaagcaaagcgtaaatataccctaataaaatttttgtgtataagaagggaaactattcagaaagtgaaagtgatacaaatatgagatagccccagagaaatttgaggcacctcgagtttctttcaaaaataaaatgcaattgggaagccaaggcaggcggatcacctgaggtcaggagttcgagaccagcctgcccaacatggcgaaaccccgtctgtactaaaattacaaaatattagctggcgtggtggtgggggtctgtaatcccagctattcggtaggctgaggcaggagaatctcttaaacctgggaggcagaggttgcagtgagccgagatcatgccactgcaccccagcctgggcgacaagagtgaaacttcgtcttaaaataaataaatgaataaataaataaataaaatgcattaaaacaccaaaacatagaaatgttatataagttagaagagttatttccctcattttaatgatgctaaaagtgaggtaaaaataaaaagaaattcgtgaatttataagaaatgtattaaataagtgaaacatattaaaatacagaaaagataaagtaactgtagctggaaacagagagaggcatgcttgcagaaagtatataaaaagggatggaaacatatacatatttaaaaaataatcagccagggtacagtcatatgaagacagatcaagaacacccaatgtttttaaaattggaatttttgaagaagagaacgcaagcaaggaatagataggatctagtttatttgtccaggatccatatttgaaaaattcaggtatggcttatttctgaccttctgaatttactcttttatatgtttttccagaggaatccataagcctgttaggagattaggctacgaaatttctttaaatgtacctcaagtgaatagaaccttttaaatcatcatgaatggacacgaaactcaccactggctcttgcctgcaagagccttgtttctttacctaattcatcaactatttgtatttattgtttgggcagcacttctggaaaatttgcacgatatacctaagatctacagatgatgtgggtccttctggaaataattcatgaaggaaaatagtttaaagacatactaattaccatgtaatgcatcacgggcattcaatatttagtagagcttgttttagtgaagagttgcgaatttaggtattgaattcagtaatcaaaatatgccccacatcaatatcccaaattaactcctgtaattatttatacttctcaacactgctttaaaaagcacagaatcacattcttcaatataaaattaaaaatttcgaatttcatggaacgctttgaaatttttatggacttaaccctcaccttcaaaagccaaacttttgaagttatcagtgttcaaattttccttcttcaaaggccacggcccctctgctattacttatgctgtgtcttgttctcacagtccagtgtacgcttacttcttagaactttaatttgtactaaataaaaattgcactggattaaaacagtttacttcataaagctgttggcctcatcccaatgtgtaaacactgctaagctgtcttcctggcaagaaacccgtaaacaccatgaagtacatttagcaacgtcaattaacaagttctcctcatttttaaccaatgcatgcgtcatatttttaagtgggtatttgtcccgtgtgtttgcttgcagggtgactgtccactactgaggtcttgaactttgcaaatctcacttccaagtcaatcaattataacacattttatgaaacatagcacaatgtttaataaatggcaccattgatttgtaaaaattatttctcataggtgatacatttgcttacaggtacagatatttgtatcacagcatttattcaacatatttttctattgtagaatatatttaagtaaatgttaacatcaagttcatcctctgtcatctgtaatcaggtattttctgagaagtggaaaaaacaacagaatctgacaacggttgctggcagttttggggtcatcattctgtaaaacatgtgtttttgtcagtttatttttatcttgacattccccatgtcctgcagtcccaccctggggtgtgtactcagggaaactcactcataaaacccaggacactcaggcaagaatgctccggcaaacattgctccaaaaaacaaaatgtccggtgaaaacatacatcatatctgcccaaaaggacaaatacattgaggaatatgcaagcgatttactgcagtctgtctgttgttaaataaacaagagctatgcagagcattaggagcatagcggtatcattttacaatcaaaaacacaaaacaaactatccttttgtgttatatttaaaacgtaaaaatatacgtacatacacacacacaaatattaccagatgatagctatgatatcagagacacatatttacaaaaataacacagaaaagatccaaaattgtatgtgtgtggttttcatacattgagaagttctgggacagatgagagacaaagcatgagttgatactatttttatgaatatgctgttttttttcagtgtggatttcacagggctttttttcttgctataatcttactaattttttaataaaatgaattggcttttggggagaaccttcagcgttatatgcacatatgtttgtgttattcagagtttatatatgtatgtaaatatacacatagagagagtagagttttctggaagagaaagatagagatctgtgtcttgaactgtgagtcaagaaaggatttcagagaaaacatcaagaaccaggattttcacgctcgcttctgtgttaataatgcaaaatcagtttttcttggtgttaacttcttgaagcataggagaaaaattgaagaacttgaaaattgttcttaatttgcaagtaattaatttgcaactttgaaaatgacaggataaacatttcagttttactgtacaaccgttttacaacactgacagtgcatctattttaatttggcggagaaccttgcatcacagaaatcaaatcatgcatagttctcaaaaaaggcaataagatattaagatacaattctacacttttgcacatagaaaaattaaatttgaaatatagacattatggattggtcggtgctagggttcaagtcaagcctttgttaggggctctgttgaaccaagaataccgtctgcaagtttcctgtgtcacccactatgtttagggtgagagctggtcatcttcctgtgtggggcaccctctaaactctgcaaactgaaactggaaccatggttaccacatcctgttcattttccaatttagctcaacccctgtgtcctgcccaatagaagtggcaccatggcccccaaactcatcaccgtcctgtgtctgggtaagtcctggaagggaaaggaggacacggttgggatggaaaatgctctcttgaagacctggcctctccacaacccaggtctggtggtgggaagccaggttcatccaccctctgaatccaggctgagctgacaaacccagttacaaggagggaaggattcacatgaagacaagctatttttctctcctctcttttttttttttttgcctaggattctgcctgaaccagaagatctgcccacatgcgggtgagtcctatcccagtcctaggatgctgtgttggccaaacacaaatgattctccaggcagggagggtggacacgaagtcaggctgatgcagatgacatggggtgggctttgcagtgagcactgggaacacaggaagggagtcctctggagaccccaggctccattttgttctagaaaccctccataggcagcccctcaggctcatccaatctcctgaaggagcctgtgatgctcagaatccagcgtgtctgggggtgggtagggtaggagtactctctgtcaggaggcagggacccgtgctgggcacttgtgttgggaattgttaaatgagttgatatgttttttgtattgcttgaatctggtagattcctccttctcctccatgtacagatttctgttgtagacaagaactaggagcaacttggctcaatattgtatcatcatgcttagtagaattctgttctggggagaccttccatgtccactctggggtggctgtgtccctggcttgcgaccaggtatcccagggcatcaggggaccccacgttacagggcaaaccagaacaatgtaaagaaggaaatgcccccaaggacagcgggagacggggggctccacatttccctctctaggctgtgcctccttctcttccaggtgctcaggacaagttctccctgtcagcctggccgagccctgtggttcccctaggaggacgtgtgactctctcctgtcattcccatcttcgatttgtcatatggacaatattccaaacaactgggacccgaagccatgagttgcacactggcctttccaacaacatcaccatcagccctgtgaccccagaacacgcagggacctacagatgtgttggaatttacaagcacgcctcaaagtggtcagctgagagcaactccctgaagatcatcgtcacaggtaggagaagtccagcccaccccacgtccaaccggtgtccagatggacctgcccagagtccacacccaatgaagccagagagttgttgtgggattcctagtcatgcactaaccgtggacacagaagccatcctgggaatttaaagagagggcatttcctgtgaggaatcaggtacccaggtggaggaggagggaggaagccgagcagcaggagaatctgcctggggagtagcagacgcagggtgctggtaccaattgcagcagggtggatccagggaggagccatgttgcctgaccccagctggatccagggaggagccatgttgcctgaccccagcaccagtgtttccctcggggaagtcgttactctgcctcgaaggagccagaggcttggggaagtgacagttccctcgggagatgagtccagtggctcagtgggacatggattgggaaatgcacccattcctctcctcctccttcccagtctcgtgacactcatcccttctctctcatggatgtgcagagtgtctcacggagagttagaaactcatcctgtggagtcgcccctgcccatcctataaagcagggaagggagagtgtggagttattcatattttatatatgtatgtaaatatacacataaagagagagagagagtagagttttctggaagagaaagatagagatctgtgccttgaaccgtgagtcaaggaaggatttcagagaaaacatcaagaaccaggattttcacggttggttctgtgttaataatgcaaaatcagtttttgttgttaacttcttgaagcatgggagaaaaatttaagaactagaaaatagttctcaatttgcaagtcattaatttgtaactttgaaaatgacagaataaacatttcagttttgctgtacaaccattttacaacattgacaatgcatgtattttaatttggcagtctcacattcaaggagctcagaagaaacagagaagagattgggtctttccaccaagagagcggggaaagcaggttggggtgaggcagggagatccaggctacgaaagctcctggaggatctgaatggagattgggactgtgaggggctgcccaggaaaggagtttaccgtgtccttctgcctaaacagggaaaaggagtcatttccaccctccccaacaagtagtcacgtctaacctcttgggttttggggcaaaaccagttgttccttcagtgtgagcctgtgagatttcttctgatcctccagagagtcttgtatttttcaacacgcagagttgaaaaacagtgaggctcataacctcacagtcccatgccagggaacctaagtccagcagtgtgttttctgaaggttctcaaagcacagagtaattcccattttccgggagaaccccacatctcatatggtttcaagccagacaatggggatccgcgcagagagaacatgcacgcacacaaacaggaaggacgcagacgggctttgggggtgatgagggacagcttcaccctgaggtctcaggcgaggggtgaggaaggagactcatgtgaactcctctgtctctgctctcaggcttgttcacaaaaccctccatctcagcgcacccaagctccctggtgcatgcaggagccagggtgagcctgcgctgtcactcagaactggcctttgatgaatttatcttatacaaagaggggcacatacagcattcccagcagcttgaccaggggatggaggctgggatccattacgtcgaggctgtcttttccatgggtcctgtaacgcctgcccatgcaggagcctacagatgctgtggttgtttcagtcactcccgctatgagtggtcggctcccagtgaccccctggacattgtgatcacaggtgagtgtggctggaccatccgtggtctgttggtgccatgggagcttcatgtaatgcggttgttaatcaaacctcagtagaggaagagaaataaaggaagagagggactgtgaaaaagtgctcagcaaaggggtttaacatgtcttactgcttaaagaggcaggaggggtcacttctaccctccccaacaagtagtcacgtctaactccttgggcttgggggtacagccagttgttccctgcagtgggatcctgtgaggttccttctgatcctcccgagattcttatatttttcaacaaacacaattgaaaaatagtaagactcataaccccgtagccccatgtcagagaactcaaggccagcactatgttttctgaagggtctcaaagcacagagtaattcccattttccaggagaaccccacatctcatatggcttctaggggcggtaaaccacagggactcagtcaaaagcagaatcaaagaaatgcagaggaagtaaaaagacacagacataggctgactcaggaccctagagatgaacatgagattgacaggggcaccagccgacattcggaatctgctgccaagataagaacagcgaggctgggcgctgtggcttacgcctgtaatcccagcactttgggaggctgacgtgggcggatcacaaggtcaggagttcgagaccagcctgaccaacatggtgaaaccctgtctctactaaaaatacaaaaattagctgggcatggtggtccgtgcctctaatcccagctactcaggaggctaaggcaggagaatcacttgaacccgggatgctgaggttgcagtgagccgagatcgtgctactgcactccagcctaggagacaagagtgaaaatctgtctcaaaggaaaaaaaaaaaaaaaaaaaaagagggagagagattactttgttcatacactcaggcgtgtgttctaaaatcagcctctttttctcctaggaaaatacaaaaagccttctctctccacccaggtggaccccatgatgaggctgggagagaagttgaccctcttctgcagctctgaaatctcatttgaccagtaccatctgttcagacacggggttgctcatggacagtggctcagtggagggcagagacacagggaagcattccaggccaacttttctgtgggccgtgcaacgccagtccctggcgggacctatagatgctatggttccttcaatgactctccctataagcccccagtgacccgctgcaactttacaccacaggtgaggagcccatgcctgctgcatgctctggtgcccactggatcacagagccacacgtgaggggcgtcccgctgggcacacaggggtattaggtactctggataaaatgaaacagtgacaaacacacacaggaaaaaagaagctgagcatgatggggctgtcagggtgtagggtggtaagacggggcagctccacaccctctgccaccttctgtatgaagaaagaggtcaggacaaacacagggggaggtgaggccagatgtagtttgtcgaggtcagaggttgcccctcacccttttccatttctccaaagcccctcctgacccctcaacacagagagatctccctgctggggaacgtggagatttatcatcccgatgggagacaatgtctgttgacatcacccaccatgcttctccttatcaccttcccatcccagggaaggaattgtcccccagagattccaaggaagagaccccagggcccccattagtctttaggtggatgacagagtagggggtgtgcagggaccaagcctccaaagaaaatggtgctaatgctcgggaggctgaggcaggagaatcgcttgaacccaggaggtggaggttgcagcgagacaagatggcaccactgcactccagcctgggcgacagagcaagactccaactcaaaaaaaaaaaaaaaaaagaaagaaagaaagaaagaaagaaaaagaaagaaagaaagaaagaaagaaagaaaagaaaatggtcctactttaatggggcaatcaatgacgcttgctcaccccttctctgcctttttttttcctaggaaacactaagagtactcctctgtcattcacagaatccacccctgaatctggtaagcaaataactcttatcctagtgtctgagtccctggggagacagaaggccccagtgtgagtgaaagctgtgccacctcccagctccatgaccctgggctaggcagcccctcccaggtccccacattccccatccacatctgagactgtggtcagtgcgggaatctgtaaggcctttcagcctcagacgctttgggactgaggcctcatccacaggggaggaagaggtcagagtcacctgacccttgctgaaaagcaatgcttctcattcctccagggaggtctgtgaacatgaaaatgctggaagatgggaaggatttaaaagaccatattcgatattcactgtctgtctttttttgttgttttttttttttgagacagagtctcactctgtcacccaggctggagtgcggtggcacaatctcagctcactgcaacctctgcctcctgggttcaagcgattttcctgcctcagcctcccgagtagctgggattacaggtgcccaccaccacacccggctaatttttgtatttttagtagagtcagggtttcgccatgttgcccaggctggtgtcaaactcctgacctcaagtgatctgtccgccttggcctcccaaagtgctgggattacaggtgtgagccaccgcacccagccttattgtccatcttctaatgtcctatgacatattcaacagttcctgtgttccagtggtgtgtgcagggaggagaaaagttataatgaataaacgtgtgaactgatttattcagatccattaattttgtattcattaagatagagtcatgtgacagagaaagcttaagtggatcctttagagcaggtggaagggaagactctatgtcactcaaggaactgacatttaaggtgtgatcctgatgacaaggacagccagtgttggaaggattgatggaaggacgttcccagcaggtaaacagtggtgccataaactcaacatggcagggctgggcgcagggctcacaactgtaatcccagcactttgggaggctgaggcgggcagatcacaaggtcaagagatcgagctgttcctggtcaacatggtaaaaccctgtctctactaaaaatacaaaaattagctgggcgtagtggtgcatgtctgtggtcccagctactccagaggctgaggcaggagaattgtttgaacccgggaggcggaagttgcagtgagccgagattatgccactgcactccagcttgggcgacaggacgagactccgtctcaaaaaaaaaaaaaaattcaacatggcaatgccttgtgtgtgttcacagcaccagtgaggctgacatgccgggggagaggggtggagctgagagaggaggacagggaccaacttgtgtgaacgtttctcgtttttaaaatgtttaatttttgtgggtacctagtaggtgtgtatatttatcaggcgcatgagatgttttgatacaggcatgaaatgtgaaataagcacatcatggaggttaaggcatccatcccctcaagcatttattctttgagttacaaacaatttaattaagattttttttttttttttgagatggagtcttgctctgtcacccagactggagtgcattggcgcgctttccgctcactgcaacctctgtctcctgggttcaagcagttctcctgcctcagcctcccaagtagctgggattacaggtgtacgccaccatgcctggctaactttttgtattttagtagagacagggtttcaacatgttgtccaggctggtctcaaacacctgagctcaggtgatctgcccgcctcagtctcccaaagtcttaggagtacaggtgtgagccaccatgcctggccccaattatgctttttattttaaaatgtacagtaaagttcttattgactagagccagcctgttggtgctaccaagtgagggtttctaagcaacagtaaagagtttggattttattccaataaagaggtgaagacaagttttgttttgtttttttttcagagtcttactctgtctccaggctggagtgcagtggcgtgatctcggctcactgcaacctctgcctcccgggttcaagtgattctcctgccttagcctcctgagtagctgggattataggcacccaccaccatacccgactaatttttgtatttttagtagagaccaggtttcaccatgttggccaggatggtctcgatctcttgaccttgtgatccgcctgccttggcctcccaaagtgctgggattacaggtgtgagccactgtgcccagccgtttttttttttctttttttttgagacagagtcttgctctgttgcccaggctgaagtgcaatggcgtgatcttggctcactgcaacctccgcctcctgggttcaagcgattctcctgcctcagcctcctgagtagctgggattacagggggcccgccaccaagcctggctaatttttgtatttttagtagagacagggtttcaccatgttggccaggctggtcttgaactcctgacttcaggtgatccacccaccttgacctcccaaagtgctgggattacacgcatgagccactgtgcctggccgaagacaaaggttttagtcagaaacgtgtcatgatccacattctattttagagatagcaatcggccgatgtgaatagtgtttattacagggaggcaggagtggaagccaggagcctggtggggctgtgacatccttgtagaggacactcatggcagcttagatgtgctggggctggagaaggagttgagcaggtggattcaggagaggctcagagctggagtcactaagagggagagtttggaaacttgttccagtatttctcagtgcatgacctggggcacgctcatttctctctgagcctctgattccattgatggcaactcatacttgggctatcagagaagtagcaactcagcagggagccttatgggggaacgagacatagtccttgaaagagaaaagattataatcagacacttgggctcaatggatggctctgctagttatggtcactcatcttggaaagcatccgttttcttttcttttcttttttcttttgttttcttctttttgtttgagccagagtctctctgtgttgcccaggctggagtgcagtggtatgaaactggcttactgcaatgtcccagtttcaagtgattctcctgcctcagcctcccaagtagctgggattacaggtgtctgccaccacgcccggctaatttttgtatttttagtagagacaggtttcactatgttggtcaggctggttttgaactcctgaactccagtgatcagcctgtctgtgcctcccaaagtgctgggattacaggcatgagccatggcacctggccaaagcatccaagttgttggatagaatattgggctaatgatgcctccctccttatggaaaaaaaaaaagtaggaaagagaagaaagaaaagcttcccaagttgaatgtctagaagtagcagacatgtctagaattgagcccaagagtacggctggctacagtcttttctctttcaaggactatatcatggatgagagagtgatgagatgtgtccacacatgtggaagtcctcccaccacctctcagcatgggtcctggtacggagggtatgctcctatgtgacatagcctgtgccccctcccctttttctctcctgaatcctccacccacctgctcttactcattactcagaaaaacaccaacattgtttggagcaagttcaattctcagaaactggcatgagagtcatcctctggccacctctatctccattctcagaaagtgtatttgtcctgggctgagaagggacgagggaaatggtattcagctatggtacatgcagagggtttcctttgtcatgcaaaaacaaactgtcttgtctcatgaggaagtgggaggggaggcacactggagcctggtaggcctgggttcagacctccatgtctctccttttttttttcttttttttttttttttgagatggagtcttgctctgtcacccaccctgtgtacaatctcggcttactacaacctctgcctcctgggttcaagcgattgtcctgcctcagccttctgagtagctgggatcacaggcgtgtaccactacgcctggctaatttttgtgtttttagtggagacggagttttgccatgtaggccaggctggtctctaactcctgacctcaggtgatctgcccacctctgcctcccaaagtgctgggattacaggtgtgaaccaccacaccaggcctctgcatctctcttactggccatttgatttggacacgtgtcttcacttctcttggaattttttgtgtaagtgatggaaaatggagaaagtaactgttcgggtgtagggatcttggaagagcttcagataaagcatgttgtgtgttcagtatgtattggcacaaaacaggcaaccagtcaatgagagggtttatcatttgcttcttgacagacacacctcgccctcaaggacagtccagcaacctgcatatgctcactggactctcagtagccatcatctccattggcgtttgcctctctgcttttattggtttctggtgttacataaaatatcgtaagtctcagggaggggaggacagtatcatgtgagccccgtggggatgtgactggcgcacgggggtgctattcacgtcctgtgggttgatctgtgtttccgctgaggttcttttttttttttgagatggagtctcgctctgtcacccaggctggagtgcagtggcgctatctcggctcactgcaagctctgcctcccgggctcacgccattcttccacctcagcctcccgattagctgggactacaggtgcccaccaccatgcccggctaattttttgtatttttagtagagatgga[144 bp omitted]cttcactgaccaatcaccccaacccctcccctacctccacctcacctctggggaggccactgacctgcaggagatggtccatgagagaggcagaaggatgggggccatctatcggagcggtcctggggcagtcaagattgccccaaggttgctgatgggtggttctctgaatttagtgggggaggctggatcacgctgcagcctcaggcacgcccttgccttgttttggtcttggtattgccacctctgaagtgaagatctggaagactttctttttcaccccacagacaccaccatggcaaacacagagcccacggaaggccaacggacggatgaagaggtgagttctcccagccgaaaccatcaccacagcttcatcccctcccattcccagtgcccctgccttcagccactaaatatgctcctcttttcaccttcatcctctcaggagcctgcagcagaagagacacaggagatcatatatgcccagttaaaccaccaggccctctcacagacaggattccctcctgcctcccagtgtccccactacctctcggaggatcctagtatctacatcactgtccaccaagcccaggctgaggccagagctgcccccagtctttggcacaaagggcattaatacgcaaggacctggatctattcctaggaggattttttttccacggacattcttcctccttctggtaccatcttgacacctcgaagctggcaacagcagtgtctgaatgcttgtgggattatcttaaaattccagcactgctgaacagacaactagccattctacaattctattttgagcatccaaccatttaaggtgatttgactctacccacacactcatcctggatatctcattaatatcatctgagttatcctgaaactctacagacatgcttctggaaagccgatgtatatgctcagccagtttaatctctaaattactcaataaggtttttttaaaaaaatttttttaaagttctggggtacatgctcaggatgtgcaggtttgttacgtaggtaaacgtgtgccatggtggtttgctgcacctatcaaaccgtcacctaggtattaagcccagcaggcattagctctcttccctaatgctctccataccccctgccctcctctgacaggccccagtgaatgtgttcccctccctgtgtccatgtgttctcattgttcagctcccacttataagtgaaaacatgcggtgtctggttttctgttcctgcattagtttgctgaggataatgtcttctagcttcattcatgtctctgcaaatgatatgatctcattcctttttatgactgcgtagtattccgtggtgtatatgtacaactttatttttatccagtctatcattgatgggcatttgggttgattccacgtctttgctgttactcaacaaaattttgcagagatgaagtgtattctatatctgagtcatctaatatggtagccactagccaaatatggctttttaacttagaattagaatagatcaaattccatgaagtttaaaattcagttcctcagccacatggccacaatttgagttctcagagccacgtgtggctgctggctgtgggagagaatagcatgaacacaaaatgttttccttgtcagaggaagttctagctgttctagattaaaggtgcaaatttgaagatgcagagcctattttctcatgcagtgcaggctcctggaagagacctaatgtaacaaaacgataatatttcacatcaatggtgacatgtctttatcttacgaaatgcggggaacaagcagagttctcttgtggagtgtcttatcacctcttatcctcatgcaaatttctgccatagagattttctcccaaactttgagaaggtcacctctgtcaggcctctgagcccaagctaagccatcctatcccctgtgacctgcacgtacacatccagatggcctgaagcaactgaagattcacaaaagaagtgaaaatagccttaactgatgacattccaccactgtgacttgttcccgccccactaactgataccatatattctgccccgcccaagaaggtactttgtaatattcctcgcccccttaccccccaccgccctgcccccgctcgcccgccttaagaaggtactttgtaatattctcccccacaactttagaaggtactttgtaatattctccccaactttagaaggtactttgtaatattctcccccacaactttagaaggtactttgtaatattctcccctccccttaagaaggtactttgtaatattctcccccacaactttagaaggtactttgtaatattctcccctccccttaagaaggtacttcgaggc[142 bp omitted]atggtggcgggtgcctgtagtcccagccacttgggagtc[175 bp omitted]aagaaggtactttgtaatatcctccccccaacgccagccccctccacgaccttaagaaggtactttgtaatattctccgcgcccttgagaatgtactttgtacgcccatctcaaacctataagaacttatgataatcccaccaccctttgctgactctcttttcagactcagcccacctgcacccaggtgaaataaacagccttgttgctcacacaaagcctgtttggtggtctcttcacacagacgctcatgacaacctcctatttgtaccttttctcgtcccctggtttcacatggagagaaagcacacatccattctccgcacagaacatgctctggaagctgctttctgatgacgtcttcctctgagcctttattctgtttctttctacttgaattggcacctacccagagcaattcacaaactgctgcctgcaacgagctgtcactggctcatggaattgtcacatgctgtttcttcacctggtaattatctcccttttttgagcatctcagtgcagacatccaccttcatacacatgtctttatctcataggctaagtgaggaggttgattgactcacagtgtctgtgcccaataggctgagtttttatggcctgatccccactggtctttcatgtgtggactgtgagttttttttgttgttgtcgttgccaggctggagtgcagtggtgtgacctcagctcactgcaatctctgcctcccaggttcaagagattctcttgcctcagcctcccgagtagctgggactacaggtgcgtgccaccacgcaccgctaatttttgcatttttaggagagacggggttccaccatgttggccaggatgggactatgagatttttgaggcaggactgagtctgattaacctctgggactcaatgcaaccctccaaggatcctgcccataggaggaggtatcagcaactcaggtctggtaagtgatgaggacacccaacccttccagggagcagagcgtggagcaaacatcagagatcctctgatgttacccagaagtagtttctctgtctccctgggccaaagggaggatcatgcttcctctacagtctgggatatgtgagctaagagacaaatgctggttagtggatgtgagggtgaatggcaggcacactcccagcctggctatttgcatgacggccctacccttactattgtatattctacagctaggttggtcctgcagcaatctcgttttgataagcagggtaaaagtgaaagaccaaaacgtgtcttctctctgagcctctgcacacagggtggttatgccgcagagtcaactgatgctaaagggaaactatgcaagccagaaatgattttaattttgcttccacaccatcctctcaaaaataacagaaagtgagcattttttttttttctggagtctctctctgtcacccaggctggagtacagtgacatgagctcagctcactgcagcctccacctcccgggttcaagcgattctcctgcctcagcctctggagtaactgagattacaggcacccaccaccacacctggctactttttgtatttttagtagagacagggtt[133 bp omitted]accaatgataaatgtgacctgataagataattcaagtattccatgttcctacacttcatagttaagtgtagcttcaacatttatctggtggaaaaatgaatcaaccaactttccacacatgagtgttttactcttcattttcctttctatcaagaaacattatgtgccctgagaaattataaatttcataattatttgggacgaaaattgtttgcactttttttgtggggcggggggatggagtttcgctcttgtcacccaggctggagtgcaatggtgcgatctcagctcactgcaaactccacctcctgggttcaagtgattctcctgcctcagtctcctgagtctatgggattactcatatgtaatcccatatatgagtgatatgggtgcgtatcagtatgcccagctaatttttgtatttttagtagatatggg[147 bp omitted]ccttcatactttcttttgattttatttttactgtatttacttttagtttttgaatacttcaaattcttgacaatcatttgacaggtttaaatttgagataaccaaaaagttaatagttctctcaaaactctcacgttgtactcttatttacttattttactttaagttctgggatatatgtgcagaacgtgcaggtttgttacataggtatacatgtgccatggtggtttgctgcacctatcaacctgttatctaggtttaagccccgcattaggtatttgtcctaatgttctccctccccttcccctacccccagacaggccctggtgtgtgttgttcccttccctgtgtccatgtgttctcattgttcaactcccactgatgagtgagaacatgtggtgtttggttttctgtccctgt[137 bp omitted]cctccaccccctgggttcaggcaattctcctgcgtcagcctcctgagtatctgggattacaggcacctgccaccacacccggctaatttttgtattttttttttagtagagacggggtttcaccatgttggccaggctggtcttgaacacctgaccttatgatccacccgcctcggcctcccgaaatgctgggattccaggcgtgagccaccgagcccggcccagtcttaacattttttaaggcttagtcacctgcatgataccaaccaggctggtctcaactgtggggcaactggggttgttgaaccacgtgaactgcaggtgctccctgcagaacccttgcatagccggcgtctttatacctgtctgtccatccagggatggcggggttggtgtttgtcctccagtcgagggcactgacaaccttggggcagcagcaccaatcagcttccatcccatcacgtaagagccacacgtggagatctgggtgcacacgcatctcacgtgtttcccggaacagcctcagcgcctttccccgagcagccccttggacattcacctggcagaggagtctctggttctgtttctggactgtggacgcgggctagggcgcatgctgcaggtgaatcacttctgaggacagatgagtctcctgttctgcttcgggtcaccacgctgctctgtgatccagggagtctctgtcagcgtctcttctgctggatccagtctggagtgtcagggattcagagcacgacagaggtgaccatgggcaacgtgcacccgagcacttccctgccacagggacatgcagagcatttcccaccctgaggagcggccactcaagaccatcaggtcgcaggtggaggactgtgatgcagccgagctcctatcaccaccaggacttgtctcactgagcagaagccggtaacacaccagggaagacggccttgcccacggggtggctgttgacggaatctttctgttctgcgttctctcatcatggatgtgggtccctttgatgcctctgtcttcgctcagggccccaggaagattcattccccctagactctctgcttcctgggaaatgattacattctgagctttggcgaattcccgcagcaccgctccttggctccctcactgctacctggacaggcagaaacattaacatccccggccagcacctaggccccgaagtgaggggatacatgagccgtgtgcaggcttccagtccctggaatgtgtgtagggggttcactgtccaccacagcttaaacacaaaatgaacattttgactggaaaagggtagatagaaagaaaaagacctaaatgtggagcgtagtctggagccttctatggggcagaacagcactcgtgtgcaataatgctgcagtgagccacagcctcgcctctcagctgcacaggacagatgtgcagtggaacgggaagtcagaatgaccatccctgcggccgttatgaggagctgttccctaggtctctacaatgaaagctcctgaaaacagtcaatgtagatttgcacgctgagaacagcacctccattcccagctacccagagccaggtcctaattcttgcttatccaccaactcagtaaatataagtcacgaaggttgcttttattttatgttgaactttttgtagtttactagcttgcattattttttttaaaaaagaaa[223 bp omitted]gaggcagaagaatggcgtgaacctggaaggcagagcttgcagtgagccgagatcacgccactgcactccagcctgggtgacagagcgagactccgtctcaaaaaaaaaaaaaaaaaaaaaaaaaaaaaaaaatatatatatatatataaaatcatgatttctccatttttttcctttcccattctctgacttagaatatttgagcaacaaaaccataatttccggtgcaagaatgacgaagttcctaatttgagtctgcttagatacctgagcttagtctcaggcccaccatgcgctgtgaactcatcccaggttacatgatgtgcctcttggcaactctgagtgatgctaagtttcagggaagtgtgcacagatctaggacttcagtaatgtttaatca[138 bp omitted]gcctcagcctcccgagtagctgggactacaggcgcccgccaccacgcccggctaattttttgtatttttttagtagagatggggtttcaccgtgttagccaagatggtctcaatctcctgacctcatgatccgcccgcctcggcctcccaaagtgctgggatcacaggcgtgagccaccagatttgggaacattttgtaatggcagtgtgtcctcaaataccttgcttacagtgagttatatttttagaaattacagtgcccattacacacacacagctgttccttctctgtactcacgggaaacccacagagacccctccacaaacacctccgtatctgcatgaaagtgtaaaaccacatgaaagccgagcttgctatttactagttgtgcatagggttgtttgtgtgcatgtgtgtgtgtgtgtgtgtcttctagatacagtcaggttcaacggcattatgctaaatacttgccgctctaatgaataatcatcctcttggggtttctccaggtcatttgaatatggagacccacttctccagtatctctcctaagaataacctttcaacaggttcttaacatcgtcagcaaaaatattttcaacaaatgttcccaaaagcaccttagactctgaagacctaaaaaagatataatacattctttcagagctgttggggagatcctcagcaaacctacattataccataaacggtctcaaaaatagctcattttcccataagccatgagagataatgagatgggaagtccggaggagggtctgaggtgtctgtgaggagccgcctcctccagtttcaggtcattgttccctccatgtgtgtctaggaagccctccctcctgacccccaaggaccctgcgtggactgaccctccagtgcagctctgatgtcggctaccacagattcgctgtgtactaggagggggcacgtgacttcctccagcgccctggccagcagcccgaggctgggctctcccaggccaacttccccctgggccctgtgagccgctcccaagggggccaatacagatgctacgtatggtgcacacaacctctcctccgagtgctcggcccccagggaccccctggacatcctgatcgcaggttggagcccagtgggttcagacaagttccaaaattctgtgcagagctgcgtgtgcgtttgtaggggtgtttctgtgtgtgcttgtgtgtgtgtgtttgtatgtgtttgggtgtgtatatgtatgcatgtttgtatttttgtgtctgtgtatatttgtgtgtttttgtctgtacgtgtttgaatttgtgtgtttttgtttctctctctgtagttgcatttgcatgcatctgtgtgtatgtggggaggtgtgtgtgtgtgtgtaggtgtgtgtgtgtgagtttgagtgtgtttctgtgtgggtttatttgtatgtgtatgagtgtgtgtgagtatatgtatgtgtgtgtgtgttgtgtgtgcgtgtgtgtatgtgagtgtgtgagattgtatgtgtgtgcatgttgtgtgtgtctgagattgtgtgtgcgtgtgtgcatgtgagattgtatgagtgtttgcatggtgtgtgtgcgtgtgtgtgtgagattgtgtgtgagtgcgcatgtgtgtatgtgagtgtgtgagattgtatgtgtgtgcatgttgtgtgtgtgtatgtgagtgtgtgtgagattgtatgagtgtgcgtgtgtgtgtgcatgcatgtgtgtagacggcatagcacagatggtcacgaggtgcgcctggttcttccgccatgtcaccgtgttgttggggaaacgctgagttgagggctctccgacagccaggagcagcatctgagattctgtaaaaccctgcccacccgctctctgcacagggccaggcagcctgggctgtggcagggccaagactcttggatacacccccagactgcctggaaaaatgatgtccactggcgggaagagacagacaaggctgactccgcctcatcctgggtgctagtgacgtagcgccctgcagctttagccttttaaaggacattctggtcctgtggaggacgggacggccctacgcaggaccacggaccctctgctgtcccctcaccgcagacctgcaccctgtccctcagagtcaggacgtgggtgggcgggcatctctcagtagagcctgagctgcggacgtggacacagcagagtcaggagcatcatcaaactgacgaccagaatgagtgaccgaggcaaaagtctcaatcaatggaggattattattgttattgttattattattattattattagagacggagttttgctgttgttgcccaggctggagtgtaacagcacgatctcagctcactgcaacctccgcctcccgggttcaagcgattctcctgcctcagcctcccgggtagctgggattacaggcatgcgccaccacgcccggctaattttgtattttagtagaaacggggtttc[131 bp omitted]aaggcacagccgggaaaaacgcaagccacagacacatctgtgtctcctttttccaaagaggctctccgaagatttattctttactcatttccttaaagaaagacaggcacagaggccgaggggcaggtaggtggtgaggtgaatggttccagttactgcccagtaaatctaccttttacctaagataaggtgcatgcttgaagagaaaaggggagtaaaggaaaaatcaattacgcagacgtctctgggtaggtggaagaatggctgatctcatcttgtctttgctctgtgcctgggaagataagcttgtaacggacattatcagtgtggaataaaacagacctgagttttagctagacttagattgcagacctggaggccagcaaggaatttccttatgaatgatgtgtgagggcctcggtggatgcccggagcctcttcccgtgggggatctggctgatgccaaatgccagcaaccgctgtccaactggaagagggtgccgctgactcagcctccaggctgacctccccttttacattaggaatttgggagtcctgaggttttgttctatttttcctttacaaaatgtttggccggatgcagtggctcacgcctgtaatctcagcactttgggaggtcaaggcgggtggatcacgtgagatcaggagttcaagaccagcctggccaacatggcaaaaccccatccctactaaaaatacaaaaattagttaggtgcggtggctcatgcctgtaatcccagcactttgggaggtgaggcgggcggatcacctggggtcaggagttcaagaccagcctggccaacatagtgaaaccctgtccctactaaaaatacaaaaatcagtcaggcacggtggctcacgcctgtatgcccagcactttgggaggctgaggagggaggatcacctgaggtcaggagttcaagaccagcctggccaacaaggtgaaaccccatctctactaaaaatacaaaaattagctgggcctgttggcaggcacttgtaatcccagctactcgggaggctgaggcaggagaatcgcttgaacctgagaggtgggggttgcagtgacccgagattgtgccaatgcactccagcctgggtagcggaacaagagtctgtctcagataaaaaacaaaacaaaaaacaaaacaaaacaaaaaaacccaaaacgttatgcgcacccattatcccgaatcttcttagcggatcctcacggcacaccttagaggtggggagcaacccagcttttaaagttgagatcattgagcctccacccaccgaggttggactcccagactcagcgttctgtgaagggttgtggttacgattccagcgctgccatgcacctggctccaaagcctgcacggccacagctgcaacgttcccctgccctggccatgtttatagacagcgctccaggtgaagagcgcctatagccagggcagaacccctatcggggcagaggcactgtcgctccatcagagttcaccagcagcagcaccatggacgcactctcattgctgaagtccagccgtgttcgtgggcagacgcttctcagcttgtgtgagccctgggcttcctgaggtggttgttttggagcatttcgtccagcttctcccttgttcctggggaatggtttgccccatgccccagctctgtcgttccggaagtttctacttcacacagttaaaaaaaaattctctaaatatataaacaccatgacccaatttttctggcaaaaacaaacaagcaaacacacccacaaacatctttccagacacgtaagcaaaatctgcaattacacgctcttcacgtgtttaggcactataaccttcttcatttccggcaggtccttggtcctgtgtttctctagggggtgtctttccagcagcctctccttatgatgtcctgggattcctgtatccacttctctttcaataaccttgtaactcagcttgggaatcagagtggtcactttaatgtctaacatgcattttttttttaatttttgaaaaggtttaatcacaagttaaagagtcgcttagtcaaatacataattatattgtagatccatccatcccctcctggcagataatttagctcaactaaattgtaccaataaatccatctacaggtctcatggaacttagctggaaaacaggaaaaaccatggaatccgacaatgtcaaatatggcagactttgtgaatcgactcattgacttatctatctgcctacctatttacctgtattcctatggatctgttcatcagttaatctctctatctgaaggagccacagggaatgccaacagccacccagagctggaaagggcaagggagggttctccccaagagcctccagagagaacgctggccctggccctgccatcaccttgatttttagcttcgcaactctgagagaataaatttatgttgtcttaagccacccaataataatttgttatgacagcctagaaaactaattgctcatctcccccaacccccatcccctctctctctgaattcatacttatgtagtgtatgtgtgtttctatacacacatgtgccatgaattttgtttgtttgtttgagagacagaaggaactgagttttgagtcatagctaaagtgtggtttcagataaaacaccaccagctggtatttgcatgccctattctcttctagaaatgccgaagtttctagttaactggttttatttgtcaggagaagtaagggaattgcaaatattcagcctactaacattaggtggaggacacatttcctttttattctgcaaagaggatcatgatggtaacaatatttatgtattagtttgacaagagaacattgcattaggagatatacctaatgttaaacgacgagttagtgggtgcagcacaccaacatggcacatgtatacatatgtaacaaacctgcacgttgtgcacatgtaccctaaaacttaaagtatgtattacaaaaaagcgcctcctaattattccttggcctatttcttcttggtgttttaaatttaattatactctagtaatttatatttaagctaagaagtagtctactggtgttgaaaacagatgtatatagagagattcttttttgatctataagataattttgtaaactatttttatagccagaattttcatatattggtctttactaatcctgtcgaattccaatggtgtaggtaattttttggtgcagctgcagaagaagactttgcaagaaatttgcttgactttagcaagtacaagtggactaaattgcttcttttgtcctggaaagttcagaactatttgggcatttctgattctcagattcttccatccacacatttcatcctatgcgacaaggttttacatacctcccaagaaacttattttgacatagaaatattcaactattttgtgctataactcaagttatcttgctgctggtgaaaagatgtgggtgcaaaaatattttgaatttattatgctacaaataatatgtgatattaatgcacttataaattaatttgttagagtaactttgtatattgtaaatagaataccactcagaaaatgctacacaacacattaaacaaacagcatgatttagtacaaatgaatctgggaatagtctttcaaatgaatcacaatcaagaatcctacattgagtacaacacactgcttttaactggtgcttcatattctttttgtttccaatgaagttgaatacatttggttgtcttaattaaaagcttaagtgtattttgttctaacttatatttaatggattaattttagttaattgattttatgaagacacttgaaaggtgaactgaagtgtgtggtgcagatataaagctagttaagtcattggaaacattaacttggcttttattgttatttctcagcctggaattctctgaagcatctgataatattgaccctctgaactgcttgatcattactctttttttttttttttgaggcggagtctcgctttgtcagagtgcagtggtgtgatctcagctcactgcaacctccacctcccaggttcaagcagttctctgcctcagcctcctgagtagctgggattacagggacctgccaccatgcctggctaatttttgtatttttagcagagatggggtttcactgtcttggccag[132 bp omitted]gatggtctatattattatacatttttcatttttcttctatttctatctcaagatttcttcgggaagcttgccgttaatgttcttttttttaaaaaaaaacatatgctccacctttgagacagtattgccgattgaacttcactttactaagaaattcttcaccaaaagctcatctataaaactgcccagtgggagtttagcactttttctgatttatgaacattgccaactcggtagtgccaagagatttcaaaattttcaccctagaataccaaggtcaggacatctctcctacttgcaggaaagatgagctgaactggacctgatctagccttgaacagagatatgcatgagaatctagagggttttccctgagaccatggaccagcaacttctcccttactgcctctcactttgtatggggatcctcagactgtaacaatgaattcagcactgggtcttggatagttccaccctgggatgcccagatctaaatttagccaattggcctgtgaatgtgacataaaatacggtatttatggctgggcacagtggctcacgcctgtgatctcagcactttgagaagctgaggcgggtggatcacttgaggtcaggagtttgagaccagcctggccaacatggccaaacctgatctctactaaaaatacaaaatttagctgggcatggtgacatgcgcctgtagtcccagctacttgggaggctgaggcaggagaaaggcatgaacccgggaggcggagcttgcagtgagccaagatcgcactattgcactcattacagcctgggtggcagagcaagaatctgtcaaaaacaaaacaaaacaaaacaaaacaaaacaaaacaaaaaacaagtcttttacaagttcgaagctatttcttatggagttgttatttgtaaaaccatgactgtaacccacctgacttggatcaaagagaaacggaatcaatcccaaggcgtcccctcaatagggcactgggcagctgtggatgtcatggggaagttctcctgacggatgaccctccaggacacatagctatgtggggagttagaaaagaaaaagacaacactcaggacattattagtcattagctttctttgagaaagagccagagagaactagtatattgctatgcttttctgtgtgtgtgtttgtattttacattttaaaaatgaaagaatacatgaaaacctttaaaactgggtacactcagctacttgggaggctgaggcagaagaatggcttaaacccaggaggcggaggttgcattgagctgagatcgtgccattgcactccagcctgggtgacagagcgagactccgtttcaacaaaaataaaaacaaaatcaaaacgacaacaaaaaccacaacaaaaccctaggtacttgtgacggagggagaaaacagcagaggagatgggatgaagctagactaacctcattgtgctttgtttgttgtttcagtttggaaatagacatatattttcttgaataggtgtagtgccaaaatattttcacatacgatttatgaacctaaagacaaaacctaagtaaaaagagtaatgaaactaatcttaacaccaaattaagattttactaaacaaaggtgaattatttccactgaattttaagcaaaattatttaactatgttttataagtaatacatattatacatcattttatattatagatttttaatgttttaaaataatcaaatatgatatataatatattgatttataattattactgtaataaagaattttgacgattgcatatacctcattttatattataattttttaaaatttttaaataatcaaataatatatatgattattataataaataattttgacgatgtatagtaaatacatatatcatcgaaaatatttaatcttaaaatatacttagatagtgaaatgttttttatttctgtttgaggaaataggtgagtccacattaagacagaatgcatgaaatgaactcagaaccccttattatacaagagaacaaaggagtcacaattaccttcaaattcatttgacttaaacagaaaggcaatcatgaaggatcccactgacaaagaatggaatatttatagcatcaaataatatttcaatggattgaaataaatgaatatatataaaccatatatgtttactagtgctaaaacaaaagaaaataagccaaacaaacaaaatacctcatttacagcaccaaattaccacattccaaaagtggaaatggacgcaagaaccagtatctcccttttctatctgaagtattccacaggaaacattcttttctctgtagaagatttctgcagaaaatttcagaccatttttagtctgaataatctgcataatctgaataatctacagattattctgtgggaataattcatctttgtttagtgaaaccttaacttggtataagattagtttattttttacctaggttttgtctttgggtttatgaattatatgtgaattttttttttttttttttttttttttttttttttgggacggagtctcactctgtcccccagactggagtgcaatggcgccatctcggctcactgcaacctctgcctcccgggttcccgccattctcctgcctcagcctcccgagaagctggaactacaggcgcctgccac[131 bp omitted]caccgcgcccggccgaaaatatttttgcactgcacgtatattcatgaaaatatgtgtatacttccaaagtgaaacaggacatagtttccaaactggaagatggacagagttgcaaaatctgtacactgagtgtacaagcaataaacatcaatggcctcccaaacccttagacttcaggttcgtggtgaatgtagtactggatggatcctgttgatgacaaagccatgggggcaggaatgcaagctggagaatgcaagacgcaaacaaatgagtcacttactgtgtcagatctaattttttaaaaaaacttttgtgttatcttgccctcagattcatattttcaaaatctttaatttttgtttaaaaaattaccgctaaaaccaaggcaggaggagtggaattccaagacggtggattacgtgattctgttcctcatagccccacagaaacatcagctgtgaccgccatccaggaccagaaatatttctgtgacaacctagaagtgcagtgagagttgccagcaccacaacgagcaaaaaattgcagaataagatacaagaaatagttacaaaattaggtaatagtatagcagaatgctataatcaagctttattcactagccctgtttcacttttttattactcaaaacgtctagactcattggagacagggagagttatgttgatctgcaatatattcccagtgtcttgcatttatttttatttttttattttttctttttttattttattattattatactttaagttttagggtacttgtgcacaacgtgcaggtttgtttttgaaatggcataaagcaatatatttgaaaattaaaaaaaagatttttgaagaaaagagaaagaacagcttttctcttctttctgcatctcttcttccccagggaggcacagttcagtgccaggagagactccgcgggctgcgagctctcccacagaggaaagtgaaagcagagggaacacccaggttcctcagcctcaggggaaactgcccacgtcagcctctcagcaccagatcgtcgaggggactggaatggcggaatagtcttggaggaggcgggagcaccggaagctgtgagcgctcacagcagccatcacgcagatctaacaaaatggctgcagatctgacccacagactcatgggagccgaatagacatctttccaaagacacaggaatggacggcaggtttagaaaaaggctccacatacctaatcatgaggaaaacgcattaaaatcacagtgaggcatcacctctctggttaggatgataacaaaggcaaacgaaggtaagtgcttcgaagggcgtgaagaaaaaggaaccctggaataccattaataaaaatgcagattggtgcagccattttgaaaaacgcatagagattcctcaaaaaattaaaatggaactacacgacacagcatttctctgctggatacttcgccagagcaattgaaatcaaaatactgaggaggtgttgcacgcctatatttattgcaccattattcacagtagccaagatacgaaaacaacataaatgttcatcgatggatgaatggatagagaaaatgtgatatatacctatcataaaatattattcagcatttttttaagcattaacaaatttacttaattatttgaggcaaggtcttgctctgtctcctagactggagcccagtggtgtgatcacagctcactgcagcctcaacctcccaagctcagtcaatccttccacctcagcctcttgggtagctgggactacaggcgtgcaccaccacgcctggctaaccttctgtatccttggtagagatgggggtctcgctgtgttgcccaggctggtcttgaactccttgcctcaggtgatccctccgcctcagcctcccaaactgctgggatcacaggcgtgagccactgtgcctggccaaggggtacaacgttttaattctccaagatgaataaattatcgatatctaatgtatagaatgaaaactattggtaagagtactgtactatacgcttgaaatttgctaaaatagtagattctaagtagttttaccacacacacaagtgaggtgatggattgtggtgattatttcactatatatataaagtcgtcaaggtatacatctttaatatgtgccttaaaaatactcaaagtggaaaaacaaaatgagtctgttatttaggtgagacctacgagcactgcctcctgagctcagtgatggacaaacctgtgatatattaagggtcactatctcttctactatttttactatttttcaatattaaaaagcacccctttttactattacagttatataattagcagcacatggaaattgttcagaaacaagatcgcaaccctgaaattcaccatattttaatttttaatttgttgttgttgttgagatggagtttctctcttgttgccctggctggagtgcaatggtgcaatgtcggctcactgcaacttccaccttctgggttcaagtgattctcttgcctcagctttctgagtagctgggcttacagacatgtgtcaccatgcccggctaattttgaatttttagtagagacggagtttcaccatgtcggtcaggctggtcttgaactcctgacctcaggtgatccgcccaccatggcctcccaaagtgatgggattacaggcatgagccacagtgcctcacccatttctaaaatataatatatctctagtaaatccaactaagaattgaaaaaaaatgtttaaacatgaatgtatattttggcaatcaaaatattacctttgtaacatttggacacaattctgtttcatagttgcttaataaactgctacatagaatacaacagatatttattaatatttatgagttgtgcaaatacatacaacactgggtaaaaaataatttgtaaattcttctttgtagaggcagtattgtatttgcaattttgatgaaaaaatggcttaagaaaatgtatgtaattgtaca[131 bp omitted]ttctcctgcctc[225 bp omitted]gacctgacaaaatgcaataaaccactatactgcgtgaagtgagtcaatatcttaaataatttgaccaacaaaatatgtgtgcatcaacaatgtattttacaaccaaatactaacattcccaaatgtcctgtactggtcaaaaaaaaaaaaagacacagaaagaaaattaattataatattaaaaatagttttatctaatattttaaaattacagataaaaattggttatagtaaaccaaagaaaaaaacagtctacaaaataatgtgaagtatttgataggtagatatgtaaagaaatagatgcagatcagagatagaaattttgtttgatctttgaattccaaagattagagaccaggagaattataggtataaaaaaattaagaacttagtatttgagtaaaagttaattccaaaatgagttggaagaatatttgttaaatacatggatttaaatattttgacatttagtttaaaaactaaaaccagtttctactggatgccatttaggcaaataaaaatatttatgtaaaggcatataaccatataaattaatatctagtagattaagcatatagaaacaggtatatatattttaaaacatgagttgaggcaaatacttagtaagcaattttaaaacatgagccatagaacaattaaaaatattacaatatttcaaatagtaaaacttatttaagactaacgacatataatatggaactcagaatattagaaatattttatatatcaaaattgaaaaaaggaggctgtcattaatattttaagtgctcattctaaacagtaaaataaaatatcatttgttatctaagtagggaaattatgtaaacaaggatttctgtgggtaagaaaaaaagcctcacaaatatatgtttttctcggagattatcaaccaaatgcaaaataaaatttaaaaaagatttctttaaatttgaaatccatttttttgttacatgtttaatttatggtcatagcgtcactgtacataattactattcttcttttttttttttttttgatggcgtcttgctctgtcacccaggctggagtgcagtggcacaatcttggctcactgcaacctctgcctcctgggtttaagcgaatctcctgcctcagcctcatgagtagctgggattacaggtacccaccatcatgcttggctaatttttgcatttttgtagagaaggggttttaccatgttggccaggctggtcttgaattcctgacctcagatgattaacccgccttggcctcccaaagtgctgggattacaagcatgagctaccgtgcctggcccataattactattcttcttgcagctatggatttttatatctgggtgaaaattaaatgaagagtaatggtttctcagtttgaaatgaatgaatgtgagatgcgagtgaaaccttatatgatactatgaagtagaagatagagtattttagccatatttaacttgacatactattttataatacctaaaaatgtagatgcattgcaaaaacattaggacttaccaaaacaagaacagcatttttataataattttttaactggtttaataattaaaacgttgttaagctacaatgggatttaactgtcattaaaatttggaaaatactagaatcttggtaaagtgtagattagtttagagaaatagatgctttagaaaatcaaaaccgtttctggaaggctatataataatgataacagtttggtcccagtggacagggagaaaagtaggagagtgagaaataaaaccatgcattttatgtagcatatacacacaaacttattcaaaattttcttggaaagaaaatgtcttgtgacaagtatgagaaatttagcaaatttatagtagacattggtcagcaaatccaaacaagagaaagaaaggagctatgcacgaatcataaaggaaacatacaactaaatttaaattccactaaacttagttgagcagcagtgagaacaacaaaatgatggaaaatcatggacacaagaaaatatctgtgagtcctagaccagctgggactatgggtctcatctgctctttaagaatggcagtcattcgtggggaaatgaaaacctctgtttcatctcttatcaaagtgatttgcagagaggcacaatagtaggctaaatgaggcacatcttacttcctgagatcctggcaggaaaatccccaccccacggctcttctggctgggatcttagctgtcagaacagactaagtgctcactgttttaagactgagtggagtgacagctttagaacgcttgatctttaaattccaacggatctggaccaggtgcaaaggtttggggtgtagcacagcacttttaaagctggctaagagtcagagatgcatttatacctgaacacatttatagtccctgattatccctgctccctaagccttgaaaacagtcactcactttaaaaggtgagattctatttggtgaagtgagagatagagtttaccttctttacactggttccaggattttctacggacatgaaattattgttgcagttaagtgcatggtaatccccagaacccatgggaaagagatggaggtgtatggctttgcacttatgacagaaagtttccggagacatatgccattgccaaccaaagcacaacacgcaaccaccacaggtaattttaaatctcctaagttgcaggtgtcattagacaggaagtgtgtaagcaggtggcaagagctgacacactcttaaccctcatacaagcagcagagtgaagactgtgaggcttggcgtgttcattcagagacagtgtttcggatggggctatgacagaagaggaaaataagagatgccaggcaactcttgagcgggaaggctggggcaattctatgtctcaggaaccctcagaaaatattattactttaagggtttttttttaatggtccatgctgatgctaggactaaacaataattttgtgtacacaccaagttttttatgataaacactctaattccctgagaatatggctctgtatcaaagaaaattcctcttaccaaatgccatttcttgctgaagaagtagccttcatggtcacagtctgggcacctgtgcaaaaggggacatcttatccctgatataaaggtttgggacaccatgaggtcatcttcttgctgacaggtaattattatatcatctgtgagtacactgacagtatttgcatggggatttgagatgctctcagaaaaacatttttgaaatgttcaaatgactgagagctaatagtagtgattagatccattcaactgagaaaaagagagcaagagacagaaacagagatagaaagagatagagagaaagagagacagaaaaaagataaagacagtatgacagaaacagagagagagagagaaagagaaaggaaggaaggaaggaagaaaaagaaagaaagagaaagaaagaaaaagagaaagaaagaaagaaagaaagaaagaaagaaagaaagaaagaaagaaagaaagaaagaaacatctctgaaattcttggagaaaccacatggaaataagatatcagatgaggaccctgatgtctaagaactgagatgaaggaggaggcaatgagtctggatgtgtttcttcccaaccttggggtcttgcctcctgaatgttattctttttctattctgagaactttgtacaaaaggctgcctggaagggagaagaaaagaatcaagttggaacaaattgtctctgtgatagaaatgaacttggcaggagtggagaaacttttattccctgtttccataggcacatgtgaagtatctgatctgtgtcaaacatggtgtatgagatgtctcagaataaaggacatgaaaacttccaaagagcctgcctgtattaagtcaatattgtagtcaagaaaagtggacattacacacaataaataatagatagagtatgcattgtgttaaaagataataagtgcattgtgagaaggaaaagaagtaatgtgctccacagaatagtaaaaaattttgcaagcaggttgtttggctgactggagctgaaactcttccccaagtcttcaggctgtttgtcctgcagattttggactcaccaagtgccaacaattacatgaacccattcctagatagcaagataagtagatatagatatgcacatatgtacatatatcggttctgtttctctggagaacacttacaaatacataatttgatcataggaatgattctagatgaactgaatcttaatatgttttgtctactgtttctgaggtttatggaactggctgtctgattagatttaaagacattaagacagtatgacagaaacagaaagagaaagaaagagaaaggaagaaaggaaggaaggaagaaggaaggaaggaagtctgtgatagtccgtggcatgatgtggcattaggggtacaccactagatgctcctaatcctacacttataaggaacgagaatctgggtggccttgcatacacctttgaagattgttgtcaaactattaagtatagtatgtgtggctgttttgtcattggataaagaggtaaagaaaaagatgagcccagagattagaatttccagttcaagcaccactacataaatatctgaggtttctatgtgtgccctgaaagagactcttatcatctgtagctgtaggggtgagattgctgaaaatcaaaccgagaatctcatccttgaagtggctgtattacaattcaagcggagtccccagcctcacagggtatctactgttcaagtaatgccattggtcaggaatgggtgagatcttgaaagatggaatgaggatgtatattaagaccctgatacagctgaggatatcaagcccctaactttgaatgagtcttctttgccaatagaagcatcctctctatctgcaagggaggagattaaccctgtactgtctgaggaaacaatactggcctcccctgaggcagttgccatgcaaggctatgctgattctccttaggatacatcctgaccaaccctctttgcttctagacctataactagattcaagtctcgcaggccctgaaaagtgtgttacaaagtgtggctcatgagaagttgtgctacactccaaagtaatttatttatttttctaatttatccatacagaagtctgaggaacacgtgtcagagtggatattaagggtttaggataatggtgaaaagaacataaagttgagtcggaccgaatttatatatataagctcactaaacagagattgcacatttaatgttgcatcttggagaaccggaaatgattctaccagtttgtctggttgattggctgaaacatggagcaaaagctggcctgcagtaaataaactcaaaatgccagacatgccttggtttgctgcagaggaattaacttaaaggcttaggaagactgtaatgttaccatgcatgtatcaaacctagtaacccacattggaagcatcagaagatgtatctttcaacaatattgcaaagggagctctggcatccttgaggagctctgtgatttctcttctctggaagctggaacctacagtggaactgctgaattttaaaaaatctaaatgtaatgggagtaatttggcccctacctcttggcccccagagagacaggggccaagtagaggaactcagccaccaaaggcaaggtgggtttggttaccatgatggacagcaaagtcaaaccagcgatcggaatagtcccgcagacttatggtgttggctagttgatcacggcattctaacaagggagatagataggaaacctactaaattctcacttgatctgtataagcagaaaatttctatgtcaagtgaacaaaagtcaacccaaatcataaaagcagagagccacagtctctcaatcaatggctagcactgagtcagttcatagagccagaatcccctgaattaaagggatcccaggcagggttcccgtgagggcactgtccctggtacactaccaagaatatatactcttaatctttctcctggactttggttaaagggacctgcagccttttacaatggcaatggagccttggggaaaataatcagataatttgggcattactggaaatggggtatgaactgacattaattccaggagacccgaaacgtcactgtggccctccagtcagagtagtggctgctagaggcaaggtgattggtggagtttgagctcacgtgttccatagtgaatccagtgtatccctaaacccaccctgtggctgtatccccagttccagagggcaacattggaatagacatattcaacaactatcacaacccccacagtggttccctcacttgttgagtgagggttattagagtgggcccagtgggagccactagaactgcctcttcccagctaaactgtaaaccaaaagcagtcttgcattcctggaggaattccatatattgggacttgaagcgtgcagagacagtgattcccacaaccttgccattcacctctcctattttacctccacagaagacgcagggatcttggataatgatattagattattgtaagcttaatcagatccaattgaagatgttgtaacagatgtggttttgtagtttgagcaaattaatacatcccctgatacccagtattcagccattgatgtgttaaatatttttttctccatcactgttaataagaaccatcaggaacagtttcctttcatttggcaagggcatcagtacaccttcacagtcctacctcagggtctgggaaagcacctgggggttgtgatcggggtctcagtggccttcagctggtgctcttcctcctcttctttctcctctgacactggcctcagggccaacacaggacattgggtgagtaggaagttggcggggagacccatgggctgactgaaggtggggtcagggcaccaccaaccagacagattccagatgggaaagttcagctcagaaaaacggctccagcatttcccagtgagaaaacctagaaagaagagaataaatgtgaacatacatgaacataccttattcttttggttgtttcatctaacgacgtttttaaaacatctatgcaagtgtgttttcagctttccttcttttctcttgagttctctgtgcagggcaggtggctctcatgatcccaaggctgaagctctgtccctcttcacccagcccagagggaggctgatttccaaagtcctgtggggactgtggagtcagagaacgacagaggcctgtggaggaggtaattctgcccgaagaccccagacgcccacctacccccacaacctcctcactggccctcacactcccatgtccttccccgggtccagcccagctgctgatgtccaggaagaaaacttctgtgacaggaagaggggggcacctgagggtggagacagaagccccaaagtttcggtagcaatgatagcaggggaaaaggctgagaagggcttgggactcttttatataatatataaattaatataaaaattaattcaccttcacaatgtctgtctaatgcatttcaacaactgtctgtgttttcctcatgtatcttggttgtcattcctgtggggcggctcctcccacgcacctgacctttcataaagggtttctcccacggctgtccaggcatcagcctgatgaaggggattgttgccgctgctcctccccactcccccaaactcagtgtcagctcaagattgtgcccagcagggatgggaccaacgccagtctcacactcacctgtggggcagagcagacgcccatgtcagaccaccgtggattgaatctgtttctcacacacaggggaggggctgagcactgaccatggcctccagtgagtgagcagagaccccccagcgcctgtccacacacacaggggagggggagccacagcttccagcgtcacccagagccctgacccctccctgcctgggaggacgtggggttcctcttctgtcccacacggaggtgggagcctcctcctccctaatgaccctgggtggtcccagacacctgtggccactcagcattgaactctgctcatggaaggggatgcgtctcaatgtgaggaactgttcttcctctttctgtgcccgtggctgtgatgatctgcatatttcagatgtatcacaaggagaatttcatggtatttggagccgatgtgggctcttgagtgggggcgtcaatcatcctcctggactgtggagcccagcaccaggatcctctcccgtccccaccctcctgtctgaactggtctggaaattcaccatggctgagcctcccatgtcctgggcaccactgacccccacagccactgtgatgagtggggttcacgacagcaggctcagaggtgacattcatgtccaaagtcacataaaccctggatgataatcaggaattaaatacaaatcagctcaccttccccagaatcagattacagacctaacaaattcttctgaaaactctgaacatggacggaggtgccgagggaaggccaaggacgcaagggacactgagggggcgggaccgactcagagcctcattcccggggtgggggtgggtgatgttgcaacaaagagaaaaggggaagtacaggagagggacggtttggtaggaaggaaacacacactctcaagacagaacaaatatgttttattatagttaatccctgcatttccccttttgagacagggtctcactctgtcactgaggctggaatgctaaggggtgatcatagctccctgcagcctccgcctcccaggccgaagtattcctcccacctcagcctcctgagtagctgggactagagatgtgagctgccatgcctggctaattttttgctttttttatacagacaaggtcttgctatgtggcccagggtaatctgaagctcctggcctctagccttcacccacctcagcctcctgaagtgctgggattccaggcatgagccaccatggtagaccctgcattactcctctgtgctcactgccacacgcagctcaacctgagctacacagccaggtgtcaggtgcgtctctgctgatctgagtctaactgcagcatggacctgggttttccctgaagcatctccagggctggagggacgaccgccatggtaaggaccccgcaacgctgagctgatggacgggctgaaggagggagggagaccccatggggaagctctgagaaggaagaggaagcctctgctcaccctcatctggaagggcagacgcaggagggcaccagttctatttgctgctacatcccaggtctcaaggagatgaggataaaccagacagacagtggctggggggcaggaaagaccccattacagtctgaaatgtctgcagagggcctggtgcctgcccccacctcagccctaaaggtatgacagccaggctcctgagagggcagttgcacttcctgtgtggttgcacataacaaaaccccatgacaagaaggatccagcctccgagtgtccacaccctgtgcgtctctctgtcctgccagcactgagggctcatccatccgcagagcagggcagtgggaggagacgccatgacccccatcctcacggtcctgatctgtctcggtgagatttgaagagggaggggagcttctaacctaggagggacctcaccccacagccaaactctggtccctaaggagaccccaggggctcacaaagatcccagggaggggaggacctgcccaggcttcaggggaaaaatccctcacagggaactctcttccagggctgagtctgggccccaggacccacgtgcaggcaggtgagtctgttcccagctgtcccaggtccctcctcctcactagggacaaggggccacccccgtgcagctggggatggggaatagcagttctgggctgactgatgggggtgtctggagggtcctgcagctgagagctgagatctgttgggtgggaaatgacttagaatccgacctctgatttccttccagggcacctccccaagcccaccctctgggctgagccaggctctgtgatcatccagggaagtcctgtgaccctcaggtgtcaggggagccttcaggctgaggagtaccatctatatagggaaaacaaatcagcatcctgggttagacggatacaagagcctgggaagaatggccagttccccatcccatccatcacctgggaacacgcagggcggtatcactgtcagtactacagccacaatcactcatcagagtacagtgaccccctggagctggtggtgacaggtgagaggacactcaggagtcccagccccaggctctgccctcaggaagggggtcggctctcaggggcatctccgctctcacagctcaaccctggggatgatgtgggaggtgggagccccatttaacacagtgcctccttctctcctaggagcctacagcaaacccaccctctcagctctgcccagccctgtggtgacctcaggagggaacgtgaccctccagtgtgtctcacaggtggcatttgacggcttcattctgtgtaaggaaggagaagatgaacacccacaacgcctgaactcccattcccatgcccgtgggtggtcctgggccatcttctccgtgggccccgtgagcccgagtcgcaggtggtcgtacaggtgctatgcttatgactcgaactctccctatgtgtggtctctacccagtgatctcctggagctcctggtcccaggtgagaaattcacagaattgcttggagttccctgagtctccctgagtctccaggcaggtggggagcagccgcgtctcagggcagctccaggtgggatgatgttggggcgagagggctcagggctcctggggccggagacacaggaagatcagcgggggagagggagggtttgtggggaagcctgagggtcggctcctggaaaccatgaacaccttttcccaggtgtttctaagaagccatcactctcagtgcagccaggtcctatggtggcccctggggagagcctgaccctccagtgtgtctctgatgtcggctacgacagatttgttctgtataaggagggagaacgtgacttcctccagcgccctggttggcagccccaggctgggctctcccaggccaacttcaccctgggccctgtgagcccctcccacgggggccagtacagatgctacagtgcacacaacctctcctccgagtggtcggcccccagtgaccccctggacatcctgatcacaggtgaggagcccagcgggttcagtcagggacccaggctctgcacaggccctgccaggggagcccaggtggtgatggccggaatgagggttgggggtcccaagggagggagagacagagagagacaggggatgggcggggaggggagactcagagaaaacagagacagagagactaagggtcccagggagaggcctggggaggtctcagctcagaacaaggtggggcagcccctcacccatccttcttctctctaggacagttctatgacagaccctctctctcggtgcagccggtccccacagtagccccaggaaagaacgtgaccctgctgtgtcagtcacgggggcagttccacactttccttctgaccaaggagggggcaggccatcccccactgcatctgagatcagagcaccaagctcagcagaaccaggctgaattccgcatgggtcctgtgacctcagcccacgtggggacctacagatgctacagctcactcagctccaacccctacctgctgtctctccccagtgaccccctggagctcgtggtctcaggtgagggccctgatcttgtcctctccgagctcaaaggctcagctcaggccctgcccccagcagagctctgggacaataatgaatgaggggagtgaagcgggagggtccacaggggagggtccagcccatgggagagtggaaataggcagggacctcccacccctggctcccacccctgaagtctcagtaaagagcatgaagggctgggaggagacgggggcgggggggcgggtggtgaacctcagagatgtgattagactgagggtggaagacggagaccccacccgctcccctcctgatgtctccacctcagaatcagagcctctgggggtcccaaaccctatgtcctgaccccatgggtgacaaaaccagccactcccagctcaagagaagtttctagactcatctcaatgctacctccaatattcagggtctgatttccagggcagcagcggggagggtggacagtaagggtgtggtctgcgtggcttcctggggcttcagggatggggcaggtgttccctccgtggtgttcagaggggagggaggtgtctgaggttcagcattgatgagcggagcagagggatctttccccctccctgagcaggattcccaggagccgtcacctctcatgggggagccagggtcaggggagatcacagtcaggtacttggtctaggagtcaggtgggaggagcccggggaggtggggctgggtctgtgatggctcagcctctccttgggaggtggaacttctgaaagagcccattccccttgcaccctggactcctcatctgaataagggggagctgcctggatgtgactgccccaaagccccttcatttctgaccttctggggcatctgggatgtggctcatcctagacctgctcccgtctacagccctctctggccctctcctaattctcccaataactgagacttgttaagagttaaaaaaccaacggagatgggggcaggtgcatgcagttttacccatccctcctggaatctcagcttagtaagacaaagacacaatattttggaaaaaacaaaagtttacaaaaccccgctggttgagagtctcccctctctcgtgtacaagagaaaatgtctccaattttctaccaaaatcaatagctggcacagctctgcaggacccccagcccctggccttgtcctgcaggatgtgtgatgagtagaggaaggagaacaggctgggtggggaggatttggggtccaggcctgacttggacactgggaagatgctggggctgatggaggaggaagagaggcaggtgagttggagagaggacagatggacagtgtattggcagctctcatttctcatttccaagagcccctgagtataagcccttcacccacacctgcggggtccctgggccatctcaagacaagagaggaggctgcttgggcctcggtgggatctgactgtgatgaggctggagtccaccccagatgtgctcctttagagagaagcaccccagctgtgggtgccgctcacactgcccctcctgtgctcacctggaggcctctgtgctcagggcatccctgagaataaggaggggccctgcacctgctccctggacaagtcaggcaagtattcacagcacgtctttctgtttaactcatttctactctgcattttctgtatgcacttgtcctttgttactttttttctaaaacttttaaaacagtatttgaatatatgaatttataatatatgaacttaaaattgtatgcatatattatttaaaaatccttatttatactcccctttaattgagtcttgatttaatttatacattcaatgtagaaacaaatttctcattaatatcaactcttcctccttcacacattaaaaatgaagattttcttaatgaatttaagacatgttttgaaattttactcctaagaatattgtatgctcattttaacttaaagaattattcaacatctttaacaattgataagtgaggtatttgatttctttatatatatatatatattttattattatagtttaagttccagggtacatgtgcacaatgtgcaggtttgttacgtaggtatacaggtgccatgttggtttgctgcacccatcaactcgtcattcacattagtatttctcctaatgctatccttctcccagccccccacccctagactggccccggtgtgtgatgttccccgccctgtgtccatgtgttctcattgttcaactcccattatgagtgagaacatgcggtgtttggttttctgttcttgtgacagtttgctgagtgatggtttccaggttcatcaatgtccctgcaaaggacatgaactcatcctttttaacggctgcatagtattccatggtgtatatgtgccacattttcttaatgcagtccactgatggacatttgggttggttccaagtctttgctattgtgattagtgccacagtaaacatatgtgtgcatgtgtctttgtcgtagaatggtttataaccctttgggtatatgcccagtaatgggattgctgggtcaaatggtagttctagttgtagattcttgaggaatcgtcacactgtcttccacaatggttgaactaatttacactcccaccaacagtgtaaaagcgttcctatttttccacatcctctccagcatctgtagtttcctgactttttaatgattgccattctaactggcatgagatggtatctcactgctgttttgatgtgcatttctctgatgaccagtgatgataagcatttttgcatatgtctgttgcctgcataaatgtcttctcttgagaagtgtctgttcatatcctttgcccactttttgattttttttttttgtaaatgtgtttaagttctttatagattctggatattagcactttgccaaatgggtagattgcaaaaattttctcccattctgtaggctgcctgttcactctcatgatagtttcttttgctgtgcagaagctctttaattagatcccatttgtctattttggcttttggtgccattgcttgtggtgttttagtcatgaagtccttgcccatgcctatgtcctgaatggtattgcctaggttttcttctagggtttttatggtgttaggtcttacatttaagtctttaatccatcttgacttaattatcgtatagggtgtaaggaagggatccagtttcagctttctacatgtggctagccagtttttctagcaccatttattaaatagggaattctttccccatttcttgtttttgtcaagtttgtcaaagatcagatggttgtagatgtgtggttttatttttgagggctctgttctgttccattggtctatgcatctgttttggtaccagtaccatgctgctttggttactgtagccttgaagggtagtttgaagtcaggtagcgtgatgcctccaactttgttctttttgcttaggattgtcttggcaatgcgggcttttttttggttccatatgaactttaaagtagttttttccaattatgtgaagaaagtcagtggtagcttgatggggatagcattgaatctataaatccctttgggcagtgtggccattttcacaatattgattcttcctatccatgagcatggaatgttcttccatttgtctgtgttctcttttaattcattgagcagtggtttgtagttctctttgaagaggtccttcacatcctttgttagttggattcctaggtattttattctctttgtagtaattgcaaatgggagttcactcatgacttggctctctgtttgtctattattggtttataggaatgcttgtaatttttgcacattgattttgtatcctgagactttgctgaagttgcttatcagcttaaggagattttgggctgagtcaatggggttttaaatatataatcatgtcatctgcaagcagagataatttgactttctcttttcctaattgaatacactttatttctttctcttgcgtgattgccctagccagaacttccaacactatgttgaataggagtggtgagagaggaaattcttgtcttgtgccggttttcttttcttttttttttttttttattatactctaagttttagggtacatgtgcacattgtgcaggttagttacatatgtatacatgtgccatgctggtgtgctgcacccactaatgtgtcatctagcattaggtatatctcccaatgctatccctcccccctcccccgaccccaccacagtccccagagtgtgatattccccttcctgtgtccatgtgatctcattgttcaattcccacctatgagtgagaatatgcggtgtttggttttttgttcttgcgatagtttactgagaatgatggtttccaatttcatccatgtccctacaaaggatatgaactcatcattttttatggctgcatagtattccatggtgtatatgtgccacattttcttaatccagtctatcattgttggacatttgggttggttccaagtctttgctattgtgaatagtgccgcaataaacatacgtgtgcatgtgtctttatagcagcatgatttatactcatttgggtatatacccagtaatgggatggctgggtcaaatggtatttctagttctagatccctgaggaatcgccacactgacttccacaatggttgaactagtttacagtcccaccaacagtgtaaaagtgttcctatttctccgcatcctctccagcacctgttgtttcctgactttttaatgattgccattctaactggtgtgagatgatatctcatagtggttttgatttgcatttctctgatggccagtgatgatgagcatttcttcatgtgttttttggctgcataaatgtcttcttttgagaagtgtctgttcatgtccttcgcccactttttgatggggttgtttgtttttttcttgtaaatttgtttgagttcattgtagattctggatattagccctttgtcagatgagtaggttgcgaaaattttctcccatgttgtaggttgcctgttcactctgatggtagtttcttttgctgtgcagaagctctttagtttaattagatcccatttgtcaattttgtcttttgttgccattgcttttggtgttttggacatgaagtccttgcccacgcctatgtcctgaatggtaatgcctaggttttcttctagggtttttatggttttaggtttaacgtttaaatctttattccatcttgaattgatttttgtataaggtgtaaggaagggatccagtttcagctttctacatatggctagccagttttcccagcaccatttattaaatagggaatcctttccccattgcttgtttttctcaggtttgtcaaagatcagatagttgtagatatgcggcattatttctgagggctctgttctgttccattgatctatatctctgttttggtaccagtaccatgctgttttggttactgtagccttgtagtatagtttgaagtcaggtagtgctacaaaccactgctcaaggaaataaaagaggacacaaacaaatggaagaacattccatgctcatgggtaagaagaatcaatatcgtgaaaatggccatactgcccaaggtaatttacagattcaatgccatccccatcaagctaccaatgactttcttcacagaattggaaaaaactactttaaagttcatatggaaccaaaaaagagcccgcattgtgccggttttcaaagggaatacttctttgcccattcagtatgatattggctgtgggtttgctataaatagctgttattattttgagatatgttccatcagtaccgagtttattgagagtttttagcatgaagggctgttgaattttgtcaaaggccctttctgcatctattaagataatcatgtggtttttgtcattggttctgtttatgtgatggattacatttagtgatttgcctatgttgaaccagccttgcatcccagggatgaagctgacttggtcatggtgggtaagctttttgatgtgctgctggatttggtttgccagtattttattgaggagttttgcatcaatgttcatcagggatattgacctaaaattatccttttttgttgtgtgtctacgaggctttggtatcaggatgatgctagcctcataaaatgagttagggaggattccctctttttccattgactggagtagtttcagagagagtggtaccagctcctctttgtacctctggtagaattcggctgcgaatccttctggtcctggattttttttggttggtaggctattaattattgccttcatttcagaacctgttattggtttattcatagattcaacttctttctggtttagtcttgggagggtgtatgtgtccaggaatttatccatttcttctagattttctagtttatttgtgtagaggtgtttacagtattctctgatggtagtttgtatttctgtggaatcggtggtgatatcccctttatcatttttcattgcatctatttgattcttctctcttttcttgtttattagtcttcctagcggtctatcaattttgttgatcttttcaaaaaaccagctccaggattcattgatttttttgaagggttttttgtgtctctatctccttcagttctgctctgatcttagttatgtcttgccttctgctagcttttgaatttgtttgctcttgcttctctagttcttttaattgtgatgttagggtgtcgattttagatctttcctgctttctcttttgggcatttagtgctataaatttccctctacacactgctttaaatgtgtcccagagattctgttatgttttgtctttgttctcattggttccaaagaacatctttatttctgccttcatttcattatttacccagtagtcattcaggaacaggttggtcagtttccatgtagttgtgtggttttgagtgagtttattaatcctgagttgtaatttgattgcactgtggtgtgagagacagtttgttgtgatttctgttcttttacatttgctgaggagtggtttactaccaattatgtggtcaattttggaataagtgcaaagtgatgctgagaagaatgtgtattctgttgatttggggtgtagagttcagtagatgtctattaggtctgcttggttcagacctgagttcaagtcctggatatccttgttaaccttatgtgtcattgatctaatattgacagaggggtgttaaagtctcctattattattgtgtgggagtctaagtctttttgtaggtctctaaggacttggtttttgaatctgggtgctcctgtattgggtgcatatatatttaggatagttaactcttcttgttgaattgatccctttaccataatgtagtggccttgtctcttttgatctttgttggtttaaagtctgtattatcagagactaggattgcaactcctgctttttttttttctttccatttgcttggtagatcttcctccatacctttattttgagcctatgtgtgtctctgcacatgagatgggtctcctgaatacagcacactgatgggtcttgattctttatccaatttgctggtctgtgtcttttaattggagcatttaacccatttacatttaaggttaatactgttatgtttgagtttgatcatgtcattatgatgttagctggttattttgtccattaattgatgcagtttcttcatagtgtcagtggtctttaccatttggcatgtttttgcagtggctggcactgattgttcctttccatgtttagtgcttccttcaggagctcttttaaggcaggcctggtggtgacaaaatctctcagcatttgcttggctgtaaaggattttatttctccttcactgatgaagcttagtttggcttgatatgacagtctgggttgaaaattattttctttaagaatgttgaatattggcctccactctcttctggcttgtagagtttctgccaagagatccgctgttagtctgatgggcttttctttttgggtaaccagacctttctctctggctgcccttaatattttttccttcatttcaaccttggtgaatctgataattatgtgtctttgggttgctcttctcaaggagtgtctttgtggtgttctctgtatttcctgaatttgaatgttggcttgcctttgtaggttagggaagttctcctggataatattctgaagagtgttttctaacttggttccattctcctcgtcactttccggtacactagtcaaacataaatttggtcttttcacatagtcccatatttcttggaggctttgttcatttcttttcattctcttttctctaatcttgtcttcttgctttatttcattaatttgatcttcagtcactgatatcctttcttccacttgatcgaatcagctattgaagcttgtgcatgcatcacgaagttcttgtgccgtggttttcagctgcatcaggtcatttaaggtcttctctacacggtttattgtagttagccattcatctaaccatttttcaaggtttttagcttccttgcaatgggttagaacatgcttctttagcttgaagaagtttgttattaccgaccttctgaaacctacttccatcaacttgtcaaactcattcttcatccagtcttgttctgttgccggtgaggagctgcgatcctttggaagagaagaggcactctgtttttggaattttcagcttttctgctctggtttctccccatctttgtggttttatctacctttggtctttgatgttggtgacctagggatggggttttggtgtggatgtcctttttgttgacattgatgctattcctttctgtttgttagttttccttctaagagtcagacccctcagcagcaggtctgttggtgtttgctggaggtccagtccagccagaccttatttgcctgggtatcaccagcagaggctgcagaacagcaaatattgctgcctgacccttcctttcgaagcttcatcccagaggggcacccacctgtttgaggtgtctgttggcccctactgggaggtgtttcccagtcaggctacacgggggtcagggacccacttgaggatgcagtctgtccgttgttggagctctaatgcggtgctgagagaaccactgctgtcttcagggctatcagacagggacgtttaagtctgcagaagctacctgctgccctttgttctactatgccctgcccccagaagtggaatctgtagaggcagtaggccttgctgagctgtggtgggctccacccagttcgtgcttccaggcatctttgtttacactgtgagctactccaacctcagcaatggtggatgcccttccctccatccagctgcagcatcgcaggtcgatctcagactgctgcgctagcagtgagcaaggctccgtgggtgtgagacctgccgagccaggcacgggagggtatctcctggtctgccagttgctaagactgtgggaatagtgcagtagttggtcaggagggtactgtttctccggatacagtctgtcacggcttcccttggctaggaaagggaaatcctccgaccccttgtgcttcccaggtgaggcgacaccccatcctgcttcagctcgccctttgtgggctgcagccacagtccaaccagtcccaatgagataaaccaggtacctcagttggaaatgcagaaatccagctgcagaccggagccattcctattcgaccatcttggaagcgacacctatattttttttaaagaaggataggtatccatgagaaagtgactggtttcattatgttctttttatttgttattcacccactagagaatggctcctttctaattactcttcaatgatctcctttaatttctggtacaattttagaaatcataatacatggaaattttatttctttatttctaaattacatgccaatatttctcaaatattaacgtgtatataactacataataaatacatttctgaagttttacatatatacacaggttctatacattacacatgatgtgagtggaggtatatctaaacacatttttatatgtattcatccatatgcttcacatatttgacatgacaggtctttacaggtttgttattggtcttcttatctagactcacacttgctggagcagaagtattcatttatgaacctcggatagcaccagcatttaacatatgcatatttgtgtgtgtgggtgggtgtgcatgcacgtgtattgcattctaggggttactgcctgtatgaggaattagttacctaaggattaaacggaagatgaaaccccaggtgaagtggttgagggcatgaaggggaggcagacccagactttcacccctttgtgttcctgacattcaagagcccctgaggtccaacccctcctccatggagcctgggtcctcagctggcggatccgtgaaactcatctctggggagcattggcttctgtggtcctgcacctgctccttgcagccagttagggctcagagaggacacagagagcacacaaggtcccaggctgcacagagagcacataaggtcctggttatttctgtattggggaccacttaccatatccatgctgagctcccgggatgcaggaaaactctcccaaatgactcaggagctgagtttggatttgtagaacacaggaagtctgaaataattcaatgaggagactggagggaaccctgctacagcagaggaagggtttattgaggaactccataaaactcatgtcaagagacacaggggaaaagaagaatgcagagcccaggagtgaggctgggctcagggctcttctccactgttttgattctcagaagcagctgagaccctcagcccatcacaaaacaagacagactccacgactagtgagtgaggagatgctctcagttatgggactggcacagagggtcaggtcctgtaaaggggaggtgggtgccctgggtggacatacaggagtcccggggtgattccgatctgccctgacctctgtgacctctttgtccagcatccctaggccaacacccccaggattacacagtggagaatctcatccgcatgggtgtggctggcttggtcctggtggtcctcgggattctgctatttgaggctcagcacagccagagaagcctacaagatgcagccgggaggtgaacagcagagaggacaatgcatccttcagcgtggtggagcctcagggacagatctgatgatcccaggaggctctggaggacaatctaggacctacattatctggactgtatgctggtcatttctagagacagcaatcaatatttgagtgtaaggaaactgtctggggtgattcctagaagatcattaaactgtggtacatttttttgtctatgaatgttgacttcccttgactggatcccctttttttcccatccccagacatgaggctccatcccacatggcaccgttgggtccacacctccacacacctgtgtgctctggtccacggcatgtgacacagtcttccttattcctcattgtcacactccttgatgtcacttactgagtccccgtctcttcagttcagagatccaaacctgaaccaccaactaaatcaacgacaggagatcagattccaaccaggaaaacataaatccaccctgctgccctgacaccctctctgtaccttatgagcccttccctctttctcagatgctatctgtgtaatttctcctgaaatatcaccacttggaatcatcacactggcatttcaagtgacaccacagctatgctgattcagaaaaagacatctctaaaatactgtaattagtggtatctaccaatttctgtgacataaatatttttctcatggcccaaatcaaggtgccaatgggttctcactgaatacagggttgggaagcaagggacagaactgtcttcactaatgagcaccagggacctgtggcacatcccactgagagctcacccatatacctacagtcctttctatttcagaggcaatgatcacttctacttcagtgttatggcacaggtcaaatgaaattctgacactgttatcctagcatatccacaaaagacaaacctattaatatc[140 bp omitted]ggtgaaaccccgtctctactaaatacacaaaaaaatattggccgggcgtggtggtgggcgcctgtagtcccagctactcaggaggctgaggcaggagaatggcgtgaacctgggaggcggagcttgcaatgggccgagattgcgacactgccctccagcctgggcgacagagcaagactccgtctcaaaaaaaaaaaaaaatccaagtacaacataagaaaaatgttaacagaactatgcagtttcgatgaaagaattttttttgagatggagttttgctttgttgcccaggctggagtgcaatggtgcaatctcggctcactgcaacctccacttcccaggttcaagcaattctcctgcctctgcctcccgagttactggactacaggtgtgcaccaccattcccggctattttttgtatttttagtagagacgggggtctcgccatgttagtgaggctggtcttgaactcctgacctcaggttatccacctgcctcagcctcccagagtgctgggattacaggtgtaagccactgtgcccggctgatggaagaattcttaaatgactcgttctactttctgctggtccaggcactccttggcttggggcagcatcccaccagtttctgcctccatcttctcaatgcttacacctacctggttgcctctgtcttcacacccattcttctgtgtgtgtcttttctcttcttcagattatgatatcactcagatcagattaggactcatcctaattcgttatgatcccttgatcataacttaaatgcatttgcaaagactctatttccaactatgttcacatttatagctaatggggctcaggatttcaacgtgtatattagggggaacaagtcaatttatgacagtgtctacaagaaaagtatgcatagaaatacatttaaccaaatacaaaaattaggtgggtgtggtggtacacgcctgtaatcccagctactcaggaggctgagacaggagaatcgcgtcaacccaggaaacagaggttgcagtgagctgagatcttgccattgcactccagcctgggcaacagagtgagactctgtctcaaaaaaagagaaatacatttaaccaaagagatgcaatacgtatacattgacaattttaaaatactgctcaaagaaataacaaaagacctaaatgaggaaaaagtcatcccagtatcataaatcaaaaggcttaaaattagttatctccctctagggaacctagactaatacactcaccccgtctccttgttcggaggctctcctgcctatcagcttttctcctctgtgctttccatgtccctgtggttctctggtgagccccatcatgctgtcctagaagatccacttagaatttcggtatttactcaccattttgactcctcttaacgagacaggcacatgccagctgtttccattcatccaacctgaacctgagcccccgatcattttttctaccacttttcagtcctgggaaactcagtcccaatgtgcttgtcattcatttgagaataattttcattttctccagtagttttaaaattactttgtatctattctagatatcgtttgctctatcatagttaagacattaatgttatttatgaatttgtgcacattaaactcatgatctttcatttctgtaaaaatgtcaactatttcctttgcaagtatttattgactaacatactccttatttccttcattctgaaagtgtgacacatagagatatatctgtttcctcttctcactctattctttgtgtgcattaattatcttttctatttttttcatttctagtttttctccgatgactaatgaaaaatttaataaatattctacaccaatacaatgtttatcatttcagcagtgtctggttcttgatgaaagtatttctaaatgtgttaatataatttactattttcacatcacaatagcttcctaattcatttctataattgcctgttttttctctaatggactcttcgatttttattcctctggggtgggtttttctcccacacacctgatcttccatacagggtttctcccagggatgactcaggaaggaaaactgatgaggggcatttttgtacccgctcctgccctgcggtgtccatgctcccaagtttagaatcagctctgtgttatgcctggcatggtggagcccatgagaccctcacattcaagtgccaaagatgcccggtccagcagtgataaagcgagactgtgtcatgcacacccgggaaggtggctcagtgctgaatgtggcctgggtcaccaaaccaagcaatcccagattctgtccacaaatacagaagagagggagccacagtctctctaggatcccacggtttcctccactttttcctttgttctgagagaaagacaaagtgccatgactgctctgtgggctggacagatgcctgttttcacctgcaggcttgaactcaagctgaggtcttgagcattcccaggtactgataaagcaccttagattgtttctagaaaacactgaaaaattaaccctttgttaattatgtagaaacaaaccctgccctgaaccaaactcctgaaacgctcaggttaaactttgtaactcaatcccttcactgcagatacccagtaggaaagtcacatgagcaaggatgagatgactttggttaaactcagaccccacagggccaggaaggcctgacggagaggaggctcgtgttgccaggtctcagataagaactgtttctaaggacttttttaaaaaccccataagaaactcttccatgtctttcacccctctcctgctttgacatggtttattactagatattctttaggacatcaggaatgcagataggctgctctcgagagaatacttgcccagcaatggcatctcctccaatggactgacagcaactctggctttgaacctctggaaccagggaactctgcttctaagcagctctgtcagcctctcccttgttgctgataagaatttcctttacctctctatgtacagagagctctctctatgatgtttttcctctactctcacaccacaacagtcatcaacacaggagacttgtaggatcagatgtgtgggattgtttcccagacccaatagcgaacagcagctgggtgtcctctaagtcggctccgagctgtctacccagacacagtcccagatcccacagattgaaggcccattctccaagattgcccccacacaccattcccaagtccagacctccagaacttctgactgactggcttcaagttggggatcccatgaccacctctttgggtttgattaatttgctgtagcagctcacagaactcagggagacactgacgtttactggttgaatacaaagcacactgcagaggacacagatgaagagactcataggaggaggcatgggggaagggaccggagcatctatgccctccctgggcgccacgctccaggaacctccgcatgctcagccatccagaagcccatgaaacccagtcctcttgggcttttaaggagcttcgtgacatcagcatttcctcccacaaggaacagggtgagaccatcttctgggagggtcttaagagccaccatcagaaaggcagggaacattcgagtcttgccttgggcaggtgaaggaagggcaggaggaggtcagaggcctcccctaaggcctaacacagccaatactctaacaaaagactgtaaccagtggtatggagttataagccaggaaccgcgggtgaaaaccagtgtgtatcacaacatcacacttccctctccggatgcactgtgtcttgccatgccatgcactccagattgtaatctttgcttctcattgtcaaatacaagcaaaatccaggcaaccctggagcaatgcagccttgaattcctggggtctcttgtatgcacactctcttcaaccaaacggggatcataactatggcatttgtgggatgcaaatcctgtgtatacgaatggcagactttccctatacatggtgcagtggagccagcttcagggctggagtacaggcaggttttgtgacatgtgggccacggactggagccagttcccttgtacaccaaagaacaactgtacttagagataattttctctagatttttgttttgttttgttattttaggttaaagcattggatagaacacccagtgtcaccttgtctacctccaggacatgctgcagggcccactctatggaagtccctctaacaaatgctctatgaacaccctggtgtttagtgcttctttctttggaatcccagcagctctatcactggacggtttggtgcactcctttgatggaattcctctgggctgcttggggtccactccagcctcaggtgtagctggaggacgcagcctcccaccttggtctggagccctgaggccctcactgtcattgcagatcccgaggttcctctcccacctccattcagtggtggaaaactccattctaattaccccttgaaggtcctgggaccctctggcctctgttctttcttgtggatccacctacacttgggaacttcctcacctctttttctgctcatgacattgatgctctgggtatttcagaaatgcctcatgtacatttctccattagggtcagatgtgagatccagagtggacacatcaatcatctacacagactggggggtccaacatcgagatcctttcacatcccaaacagttcaggtcttaccctggtctggaaatcaagcacaaatgagcccctccgaatgtcccaggcaccactgacccaacaaccactgtgaccagtgggattcatgacaacaatctgcaaaggaggaaactgaggctcagtgatgggacattacaaaccaaggtcatgtaggcagcggatgataaccagtcatcaaataaatatcaactccctcccccactccccaaatcaaagctcaaacataagtcattgttctcaaaacgttgaacagggattgaggtgcagagggatggccaagtaagcaaagggcaccgaggaggcaggaaagtctcagatgtttgttcccagcgggtgggagtggacactgtagcaaaatattttaaaaaggggaagttgagaggggactatttggttgaaagaaaacccacaatccagtgtcaagaaagaagtcaacttttcttcccctatttccctgcatttctcctctgtgctcactgccacacgcagctcaacctgagctacacagccagatgcgagatgcttctctgctgatctgagtctgcctgcagcatggaccttggtcttccctgaagcatctccagggctggagggacgactgccatggtaaggaccccacaacgctgagctgatggatggctgaaggagggagggtgaccatgtgggaggctgtgagaaggaaagggaagcctccgttaccctcatctggaagggcagacgcagaaagcaccagttctatttgctgctacatcccgtctctcagtgagaagaggagaaaccagacagacagtggctgggggtcaggaaagaccccattacagtctgaaatgtctgcagagggcctggttcctgcccccacctcagctctaaaagaatgagagtcaggctcctggtagggtagttctgcttcctgtgtggctgcagatgacaacaccccatgagaaggacccagcctccgagtgtccacactgggtgggaaggaggggaggctatttctctctgtgtgtctctgtcctgccagcaccgagggctcatccatccgcagagcagggcagtgggaggagacgctatgacccccatcgtcacagtcctgatctgtctcagtgagatttgaagagggaggggagcttctaacctaggagggacctcaccccacagccgacctctagtccctaaggagaccccaggggctcacaaagatcccagggaggggaggacctgcccaggcttcaggggcaaattcctcacagggaactctcttccagggctgagtctgggcccccggacccacgtgcaggcaggtgagtctgtccccagctctcccaggtccctcctcctcactggggacaaggggccacccccgtgcagctggggatggggaatagcagttctggactgactgatgggggcatctggagggtcctgggctgagagctgagatatgttgggtgggaaatgacttagaatctgaactctgatttccttccagggaccctccccaagcccacactctgggctgagccaggctctgtgatcacccaggggagtcccgtgaccctctggtgtcaggggatcctggagacccaggagtaccgtctgtatagagaaaagaaaacagcaccctggattacacggatcccacaggagattgtgaagaagggccagttccccatcccatccatcacctgggaacacacagggcggtatcgctgtttctacggtagccacactgcaggctggtcagagcccagtgaccccctggagctggtggtgacaggtgagctgacactgagggctcccagccccaggctctgccctcaggaagggagtcagttctcaggggcatctccctctcacagcccagccctggggatgaagtgggaggtgtgagccccatttaacatggtgcctccttctctcctaggagcctacatcaaacccaccctctcagctctacccagccctgtggtgacctcaggagggaacgtgaccctccattgtgtctcacaggtggcatttggcagcttcattctgtgtaaggaaggagaagatgaacacccacaatgcctgaactcacagccccgtacccatgggtggtcccgggccatcttctctgtgggccccgtgagcccgagtcgcaggtggtcgtacaggtgctatgcttatgactcgaactctccccatgtgtggtctctacccagtgatctcctggagctcctggtcctaggtgagaaattcacagcattgcctggagttccctgagtctccctgagtctccaggcaggtggggagcagccacgtctcagggcagctccaggtgggatgatgttggggcgagagggctcagggctcctggggccggagacacaggaagatcagcagtggtgaggccccgggggagagggaggatatgtggggaagcctgagggtcggctcctggaaaccatgagcaccttttcccaggtgtttctaagaagccatcactctcagtgcagccaggtcctatagtggcccctggggagagcctgaccctccagtgtgtttctgatgtcagctacgacagatttgttctgtataaggagggagaacgtgacttcctccagctccctggcccacagccccaggctgggctctcccaggccaacttcaccctgggccctgtgagccgctcctacgggggccagtacagatgctccggtgcatacaacctctcctccgagtggtcggcccccagcgaccccctggacatcctgatcgcaggtgaggagcccagcgggttcagtcagggacacaggctccgcacaggccctgccaggggagcccaggtggtgatggccggaatgaggggtgggggtcccaagggagggagagacagacagagacaggggatgggcggggcggggaagactcagagaaaacagagatagagactgagggtcccagatagaagcctggggaggcgtcagctcagaacaaggtggggcagcctctcacccatccttcttctctccaggacagttccgtggcagacccttcatctcggtgcatccgggccccacggtggcctcaggagagaacgtgaccctgctgtgtcagtcatgggggccgttccacactttccttctgaccaaggcgggagcagctgatgcccccctccgtctcagatcaatacacgaatatcctaagtaccaggctgaattccctatgagtcctgtgacctcagcccactcggggacctacaggtgctacggctcactcagctccaacccctacctgctgtctcaccccagtgactccctggagctcatggtctcaggtgagggccctgaccctgtcctctccgagctcaaaggatcagctcaggccctgccccccaggagagctctggacactaagaaaagaggggagttggctgggcacggtggcttacacctgtaatcccagcactttgggaggcccaggcgggtggatcaggaggccaggagatcgagaccatcctggctaacacagtgaaccccgtctccactaaaaaatagaaaaaattagccaagcgtggtggcaggtgtctgtagtcccaggtactcgggaggctgaggcaggagaatggcatgaacctgggaggcggagcttgccgtgagctgatgtcatgccactgcactcaatcctgggcaagacagcgagactccatctcaaaaaaaaaggaaaagaaaagagtggagtgaagggggaaggtctgcgggggagggtcgagcccatgggagggtggaaatagacggggcctcccacccctggctcccacccttgtagtctcagtagggtaaagagcagggaaggctgggaggagatgggggtgaacctcagaggagatgagagtagactgagggtgaaagacagaggccccacctgctcccctcctgatgtctccacctcagaatcagagcctctggggatcccaacctctaagtcctgaccccatgggtgacaaaaacccagtcactcccagctctaaagaagtttctagactcatctcaatgctacctctaatattcagggtctgatttccagggcagcagaggggagggtggacagtaagggtgtggtctgcatggcttcctggtgctccagggatggggcaggtgttccctccgtggtgttcagaggggagagaggtgtctgaggttcagcattgatgagtggagcagcggggtctttccccctccccgagcaggattccaggagacatcacctctggttgagactctccactgtctcatgtacataacaaaatctctccaattttctactgaaagcaacacgtggcacagctctgcaggaccccacaccccgaccttgtcctgcaggatgtgtgacgagtagaagagggagaacaggtcgggtcagcaggatttggggtccagcctgacttggacacgtggaagatgctggggctgatggaggaggaacagaggcgggcgagttggaaagaggacagacagacggtcccttggcagctctcatttctcatttccaagggcccctgaggatgaacccctcacccacacctgtagggtccctgggccatctcaagacaagagaggaggccttggtgggatctgactgtgatgagggtgaagtccaccccgagcagaaatgagtgatacacaacacgtgctgtgaataattccctaacttgccagggagcaagtgcacggcccctccttagtctcaggggtgccctgagcccaagcccaccaggtgagcacaggaggggccgtgtgagcggcacccacagctggagtgcttctctctaaaggagcacgttttgggtggactcaaccctcaccacagtcagatcccaccaaggctctgtgctcagggcacccggagactaaggagggaccgtgcacctgctccctggatgagttagggaatgattcacagcacgtctcatatgtcattcatttctacactgtattttctgtacgtatgctttctatatgtatgctctctcctttactaaaacttttaaagcaatacttcaatatataaatttatattttttatttcaattatatgaacctattatttaaaaacatttaattttactttgcctttcattggggcttgatttaatttatatattcaatgtagacatccatttttcattaacctcaagtcttcctcctgtacatattaaaaatcgaggtttccttaacgaacttcagaaatgtttggatgtttccaagcacaatggcccgagcgaaactgactgggcggctccctgtggcatgagaaacccgggggaggtcagcgggagctacagtgcagctcagccctgggcctggggggttcatgcccaaccttgtccaatcactggataattctaacatctaaataaacgtcttttatatgaaaaaagtgctttaaattgttaatttagatttaaattagaacagggcaatttggtagtgggttaatatgaaatacaatgaatatacccaaaccagtggctttctcatgagtacttatctctcgttttaaaaaatgtaaaggaatcaaatacttcacttataaattgttaaaggtgttgaataattctttaaattagaacgaatataattaaaaaaaattttttttgagatggagttttgctcttgttgcccagtctggagtgcagtggtgaaatcttggctcactgcaacctccgtcttccagtttcaagcaattctcctgcctcagcctcccgagtagctgggattacaggcgcccgccaccatgccccgctaatttttgtatttttagtagagacagggtttcaccatgttggctaggctggtcttgaactcctgacctcatgatctgcccacgtcagcctcccaaaatgctgggattacaggcatgagccactgtgcctggcctgaatataattttttaaatgtctacccaggacacccacctctccttgacagggaggttatataagttatacataatcttatatagaatttgttatataagttacctctgaatatgtctcttctcctctgttttgattctcaggagcagctgagaccctcagcccaccacaaaacaagtccgattccaaggctggtgagtgaggagatgcttgccgtgatgacgctgggcacagagggtcaggtcctgtcaaggggagctgggtgtcctgggtggacattttaaaaaattacattcattctaatttaaagaattcttcaacacctttaatgatttataagtgaagtatttcattcctttacatttttaaaataagagataactatccatgagaaagctactgctttgagtatattcattgtatttcatgctaactcactactaaattgctctgttctaactgcttttcaatggatctcctctaatttactaatacaatttgtataaaccgtaagacaatgggaaattttacttctttatttctaaattatgtgccaatatttctcactttaaatgtcaatatatatgttactacatcttaaataaatatctgaagttttacatatatacatatttatgtgtggttaagtaagatacttttgaatatgtgtgtaagtatatccaaattcatttgatgtatattcatgcatatgcttaatatatttgatgcggtaggtgtttacatgtttgttcctggtctagattcacctagattcacacttcataaaaacaaatactgatttatgaaccttgagtgacatctccatttagcatatatatatatatgtttgtatgtgtgtgtgaatgtgggaaactgtattgcattctaggtgttactgcctatatgaggaattagttaactagagattaaatggaagatgaaaccccaggtgaactggctgaggctgtgtgaagaagaagcacccccagactttcacccctttgtgcttctgacactggggagcccctgcagaccaacctcccatgcatggagcctgggtcctccgctggtggataagtgaaactctcatctctgggggaattggctcatgtgctcctgtgtccctggctgcacagacagcgcacagggctcagtgacttctgtattcctttgcagatcctgagctcccagagtgcaggaaaacgccctccccaaatgcctcaggagtaacattcgaatttctagaatgcaagaaatctgaaataattcaataaggacactggagggaaccctgctacacaggaagggtttattgaggaactccctagaactcatgtcagaagacataggggaagataagaatgcagagcccaggggagaggctggctcagggctcttcccctctgtttttattctcaggagcagctaacaccctcagcccatcacaaaacaagactggtgagtgaggagatgctctcgtttacggtgctgggcacaagggttgggtcctgtcaagggtaaggaggtgctctgggtggacatccagaggtcctgggtgaagttgatctgccctgacctctgtgacctctttgcccaccatccccagcctcacacccccaggattacacagtggagaatctcatccgcatgggcatagctggcttggtcctggtggtcctcgggattctgctatttgaggctcagcacagccagagaagcctctgagatgcagccgggaggtgaacagcagagagaagaatgtacccttcagagtggtggagccttgggaacagatctgatgatgccaggaggttccgggagacaatttagggctgatgctatctggactgtctgccaatcatttttagagggaggaatcagtgttggattgcagagacattttctggagtgatccatgaaggaccattaacctgtgatacctttcctctctattaatgttgacttcccttggttggatcctcttctttccccacccccagacagacatgaggctacatcccacatggcagcgttgggtccacacctctgcacatctgtgtgctctggtccatggtgtgtaacacagtcttctttattactcattgccatactccctggtgtgctttactgagcctccatctcttcaattcagagttccaaacgtgcttcagtaactaaatcaatgggagagtatcggatttcaaccaggaaaagataaatccaccctgatgccctgacaccctctctgaaccctacgagcccttccctccttctcacatgctacctgtgcagcttctccttagatcattgtgtaaccatcactgccatcctgttccacacatggtcatcaccctacacccattcagcagccactccccattccctcttccctccagcacctgctaaccacaaatgtgctttctgtctctacggatttgcctattctgtctgaaaacatttcaatctcctttgacctgtgagctcctcacttcgagacttcctgcctttccaggcagaaccaaagtacaccacgtcaaaagcaatgataggcatttgcagtgtgttggtgatccacgaaaggaaaatcacggaagcaggatagaaatccagctgcagacaagacctcaggtcgatgaatcttgacaagcagttgagctgtttttttctactcacctaggacagtcaggcagaagtatgcaaaatgactggggctgattcttttctgaattgtcgcaaacagcaagaggacttgagtcctagcattaaagagttcaacatgtctaggtccaagaccactgttgtgtttgaaggatgtaaaaccctgctgcataggatggaatatttggagggaggatcctgaaaaacatgagggatcaaatagtcctcaactttctaggacaaagggagcagctatttgccatctaccctccagaataaagaaatcttatcattcaccatctaccctctagaataaagaaatcttatcattcgccatctaccctgtagaataaagaaatcttatcattcaccgtctaccctctagagtaaacaaatcttatcattcaccatctaccctctagaataaagaaatcttatcattcgccatctaccctctagaataaagaaatcttatcattcaccgtctaccctctagagtaaacaaatcttatcattcgccatctaccctctagaatagagaaatcttatcattcatcatctaccctccagaataaagaaatgttatcatttgccatctaccctctagaataaagaaatcttattaaggacattttcaaagccttaacagaatatgaatgattacaatattatgttttacctatacagcatcttccaagttctagtttggttgtgccaggccaaacatttgagccagatttcggcaagatcaagcaggagactctggcgtctgtcgctgattaccttcccgccatacctggccaccagcctttcccatggaccccacgtgtgtctccagactcttgggtatgaatcctgtgaacacactgacctctgctttctacatgactgacaagcactatgaaatttgcataaatatgaatagaaaatatactgtccccacatcccctaaaataaaactgagtcctcacccatgggcttttgctggattatactaagaaaaggcaggtcttacaacacacattccatagactcacatctcagagaagattccttccacaggctcagggtcctgaacacactgctccactctcagggctcggagacactctgcaggtgggtcttcaccccatccgggagccctaattccttcttcctcggtttttcatacagtgatttttcccagtactgctgtctactttcctctgccagaaattccttgctggatccatggcaatctcctcaggactcctatttcataaaatggaaatggaattcttcatatgccttaaaaagtaaaataattatccaaacaatataaaatacaaacacccatctagcaaaatatttcttagtacatcatgaattcaaatatatatcgtacaaaatgactgaggattttattaattttgagcaatattgaggttttctcataatatctttttattgttaacttcaaactaaataacaatcatgtctgggaataaaatgtataagatagtcatttagaaaaatttggagatttttccttccttgtccagtaaatacttaacattttacgtgcaatgtatgtcataaatatgggcattcccccctttgaggtatgtgttcattaatatacacacatatatatactcacacacacatatatactgtacagtggcatctacacatactatatatccacatataatgtatttgtatgcaatatgtaaatatatacacacataacacctagagtaagtgtatgtatacaatatatcagaatatatatgtgaattctttttccatacaaactgtgtaacatttctttacacatctacacacatatataccgtgtgtgtatacatatagtgcttatgtacataataggtaaatatatacacaaattaacatatatatgtatacatacatagaatttgtttttctatatacaaaccctataacatatgtaactagagagttttaccatatgtatgtaattcagattgaacattaagttgtatactcattcattttttttcttaacctctcagttcttgataaatatttctttgaatcaccaaatatatacaaatttatgttgtatatatttcaataacccatggttagatgaatgaaagtttacaattattttatcattttttataccgtctctctctcttttttttttttttaacacagatgagtctcactatgttgcccaggctggtcttgaactcctgggctcaagtgatcttcccacctcagtctcccaaagtgctgggttacaggtgtgagccaccgtacccagcacttaataccttcattaaaacataaaacttcactattttcaaaaaagttttgtattatgttacattttgtggactattaatgtttctaatagataattttaacagcatgtctttcttcccttactgattttaaattatgattttatattagatgatactattgtgtctcatgcctaatgtgttattgggggtgttgggctatttaactcatcctgagtaggggaatcactctttaacatacggggtaaaaaatgaataatttagaataatttcatgaatttagttaagtattcgattatatatttttgaatgaagattcatttatccttgtcctttagaaaagacatgtactcttatatgtgtgtgtagttacattcgtgtgtgtgcgtgcatgcaattttcaaatacttgcctgtttcccacttttcatcaccggcatctcacatcctacattttggattcattgatctatctggataacatcatttaaaattgctttcactgagtatgaaaacagtaatatctagtaacttgcagctcagataatgctttatttttcctcccactttctctatcaaaatagatgaaaacatttctatattaattaaagggtaagatataacacctggaagagaaagcacatctgatgattgagggatccaccctccaatccctcctcagccctcatgcaggggaagcccaacctaatgggcttcacaggtctgtcttgctctgagcctttttctgcttaggaattggtcccctgctgacccctttaacttttaggtattaacctgagtaagcatagagttcctcacttgctgttaatcccttgagagtacattttcaacatttccttgcctttcatttttctgttgggaagtccgatcccagtgatcatgctattctactgacatgttgagttgaaaatcacaggacacaaaaatgtgttttaaactatacaatttatgctagacaatttcagtctagcatatatactttttaatctacttctggtatttttcaatttatcatggtaggtcaaggtttacattgcatgtttaaatgtatgcatcttagcacttaattagtctttcctcgtctctgtcaaatgttcaactctttaattcgtgagctgttgccagacattattctcccttctttccttctgacacgtacaatagatatgaggttctccctcctcacaatattcccccaaatatggtgaattttcacttttggtgtctccatagtgcattctggaaaattctcccaattttgttttccaatttaataaatgtctctttagctgtatcttgaccttgatagaataaatattttgagtgtgcttcttcaactgaatttttgcctctaggatttctaactcatttctctgatgctcattttttgccagtataatccatattcttgtctcagaaatttaatttcctcttgtatttttttcagatatttaaacatgtttaattgaaaaagggtcttatgcgttcctagtattctatttctttgcacataataatccttatcaacaaatgtgtagactgatgatcatagcactttttatcattagaaggatggctcttggttgtctatttttgttggacactcacctcctacactcctgagctaccatggagggatcctctcaaggcagtttttagtaatccaggactgaaaatgggggactgttccagctactgatgacacgtggcattcatttcccaaacatagtgtctgctcaggttgctcccagaaggaaaaaaatgcatgtgaaattcacactcatggccgggcacggtggcttatgcttgtaatctcagcactttgggaggtcgaagtgggcagaccacttgaggccaggagttcaagaccagcctggccaacatgacaaaaccccgtctctactaaaaatgcaaaaaaattagccaggcctggtagtgggcacctgtaatcacagctactcagaaggctgaagcaggagaatcacttggtcatgagaatcaggcaggagaatcacttgggaggtggaggttacagtgagtggagatcatgccactgcactctagcctgggcaacaagagcaaaactccatctcaaaaaaaaaaaaaaaactcatacccacacatgatacagatacccacatgtaagaactctgcagtgaatgaatttgtttcacacacacccaggggagttggctcagtggtggccatgggcctgggtcggtaaatagacatattccatcacagctttcagccttgcccagagccctggcccttctctgcctgtgaggacccagggccccttttctgttctgcacagaaatggaaacttcctccctaatgacccctaatggcaccagacacagatgccctctctgtttcgtgtgtatccttctccttctgatgaactttcatttctcattttctggacatgactgtgataaccggggtgttgatgaaatattatgagaagcatctctcaagggcaggaacaaaggggctctccttagtggaaacatcaatctcaggccttgatggtgggcgccagcatcccctcatgcccccacccctcctgtcttcacctgctctggaaattacccatggctgagccccctgcagcccccaggctccaatgacccagctcccctgtgataaatggggttcatgacaggctccaaatgaggaaaccaaggctcagagatgggaggttactgcccaagttcacacaggcagggggtgacacaagaatatttaaataaagacaagatttcccctcaaagcagagtgctaaccccacgtattgtcccagaaccttgaactcaggagcacaggatgggaacaggagtgtttgaaagaagacgggggcaccaagaaggcagagtcaggtcaatgttgtttccagggagacgggggcggatgctgttgcgatgagtcaatgagaagttcgtgaagggaacgtttttgcataaagaaaacccacactccagttctggggaaagagtcatgattccttcccttgtctccctgtatttcccctttctgttcattgccgcaataaagctcaactggaactgcagagcaagatgtgagatgagtctctgctgatgtgagtctgccccgcagcctgaatttgcatcttccctgaagcttccccaggactggtgagaagactggccatggtagtttccccacaagagtgtgtttatgggtgagctgaaggagagagtgaaaccccatgaggaggctctgagaggaaggaagaaccctccgttgccttcacctggaagggatcaactcaggaaggcaccacgtccatttgcagccacgtcctggcccttaatgagaagaggacaggacaggcagacagtgaaaggagatgaggagagaccccatgtgtgtctgaaatatcaacagaaagcctggtacctgtctcaggccaagcactaggaaaacaagagccaggctcgtggcggggtccgggacagtacactacccatggagatgctggtgggaaaatcctgtaagggagagaacccttcctttgtgtgtgttctgtggacaccatggtcttatccacccacacagccggggccagtaggaggaaacatcatgactctcacccacacggccatggtccacttcactgagatttgacaaggggaatgggagattctagcatgagagggaccctgccccacaggtaggccctggtccagtaggagaccccaggggattagggaagatctcaggaaggagaggacctgcccaggcttcaggggcaaatctctcagcgggaactctcttccagggctgagtctgggcctcaggacctgcgtgcaggcaggtgagtctgtccccagctgtcccaggtccctcctcctcaccggggacagggtcccacccccgggcagctggggctggagaacagcaactctgggctgactgagagggatcatggggggatcttgggctgaaagctgggatctgaggggtggtaaatgatataggacccagtttctgatttccttccagggaccctccccaaacccacgttcagggctgaaccagactctgtaataacctaggggaggcccgtggccctctggtgtcaggagaccctagaggctcaggagtgtggtctggataaagaggaaagcccagtgttcaggagcacacagagctcgccgaagcccaggacagcgtgagtcctccgtctcactcaggacaaagcaccatgcaggggaatattgctgtgagtatttcagtcctgctggcaggtgagcactcagagaccccctgcagctggtggtaacagtgaggggacactcaggggccccagccccaggctctgccctcaggaaggaggtttgctcttcggggcatcttgcctctcagagcccaggcctgggggatgatgtgggaggtgtgagccccatttaacacggtgcctccttctctcctagaattccactaataaaggtcctatttgacagttccaatattggaaataagagttccatcttcggccaggcacagtggctcacacctgtagtcccagtactttgggaggccgaggcaggcagatcacttgaggtcagaagttcaaaagcagcctggccaacatgacaataacccgtctctactgaaaatacaaaaattaacctggcgtgtggtgtgcgcctgtaattccagctactggggagggttcgcttgaacccacttagcacctggaaagcgagagcacggactaggctgacccagcccgcacctgcctctgcccatacccccaccctggtaggttaacacaaaggacaaagactttcgggagctcaatggcctcgccctttgcctgagacaccggacagcctcccttgcgtaacataaggaaggcaaaaagcccatgaagaccaacacagcaaaattcataattgcaaagatgtggagcgcttttgcaaccgctgcctccgggctggaggccgactgacaccgtgcaggacagcatccgcaggctcaataacacagcacccaggaaggagaacacgtgtgcatgtcctcagctatcaccattgccagcaaccccctggataaccaagaggtcctgagtctgttcacatggccggttcattaccaaagctggtgtttgagaaagccaaaaccccaaggctatttataaccgaggaaatctcacatagtgtatctcactcctgcaaacttcaccagcccgccccactccctcgccccacctcagtgtccccgagccactttgcttgcactcgctcgcccacagccactgccgccagggctttgccagcattatgtgctcctgagcagaccttctctcccctccccaacggcatgtgtgttgcacgtgcacctcgcagtgccacagctgccggtgtgagttcacccactcacccaacgacccccgagcactgggactgctgtcagagcattcgtgggtacagagattccctgtccagtacccatctgtcctccaccctcccggcgccaacactaccaccggtgtgatcacacacagggagaccagcggatccacccccaccgcaaacagcagcagccgccagcgtggaagtgcacacagagggtgcacacagtcccatgaggccggagccccgccaccttgctaacaccactaccggtgcaaatgcgcacacgaacgcctgcggggctcccgcgcaccccacccagtcttgctgacgccaccgcattgaacaccgacatggaggccagcacccctgcacccactagcatcccactgcagtcaacaaatgtgtacatcccagaggaaaagacatcattacatcagaaacacacttgcatacaaatgttgattgcagcaaaattcataattgcaaagatgtggaatcgacgtaagtgtccatcagctgatgagtgaatgtggcacatatacacaagaaaacactattcagccattgaacaaaatgaaataatgtcttttgcagcaacttggatgaagctgggggccatgacactaagtgaactaactcagcaatggaaagccaaataccatatgctctcactttataagtgggagccaagttatgggtaatcaaagacatgtaaaggggtgtaatgaacactggagacccagaagggagagagggggtggagagtgagtaatgaaatactatgtaccaagtacaatgtacactacttgggtgatgggtgtagtaaaatctcaggcttcaccactatacaattcattcatacaactagaaaccacttgtaccccaaaagctattgaaataaaatacatttttaaaaaaactgtaatacaaggctacagtaaccaaaacattatggcactggtacaaaaacagacacatagaccaatgaaacagaataaagccacacacctacaaccatctgatatttaacaaggccaacaaaaacaggcctattcaaaaaataatcctgtgataactggctagccatatgcaaaagaatgaaactggacagaccctacatatcaccatatacaaaaattaaatcaagacagattaaatactttaatgtaagatttaaacctataagaatcctagaagaaaacatggtgaaaccctgtctctaataaaaatacaaaaaagaaaaaaaagtagcctggcatggtgacaggtgcctgtaatcccagctacttgggaagctgaggcaggagaatcgcttgaacctggtggggaaaggttgcagtgagccgagatcacaccactgcactccagcctcggcagcagagccaggctccatctcaaagaaaaaaaaataggaaacatcttccttaatacaggcattggcaaagtatttacagctaagtcctcaaaagcaattaaacgaaagcaaaaattgatgagtgggacctaataaacctacagatccagcaaaggtctaatattcagaatctgtaagcaacttacacaaatcaacaagcacaaaacaaacagccccattaaaaagtgggcaaaagacgtgaacagacacttttctaaagaagacacacatatgtccaagaagcatatcaaaaaatcttcaatatgactaatcagtagggatatgcaaattaaaactacaatgagatacccacaccactcagaatagttattattaaaaagtcaaaaaataacagatgctggtaaggctgcaaagaaaatggaacaagtgttggtgagaacgtaaattagttcatccactgtggacagcagttgggagatttctcaaagaactaagagttgaactacaattcggcctagcaaacccattggtaggtatatgcccaaaggaaaataaattattctaccaaaaaggcagatgcacctatatgttcattgcagcaccattcccaataacaaagatgtggaataaacccaggtgttcatccaacaatggattggatatatggaccatagaatactacacagcaatcaaaatggaaatcatgtcctttgcagcagcatggatggagctagaggtcattagcctaagtgatgccatgtggaaacagaaagccaaacatagcacattcttgtaagcaggagctaaacactgggcacatgtggacatagataagtgtctgttcatgtcctttgcacactttctaatggggctgtttgtttgttgcttgctgatttgtgtaagttgcttctagattctgaatattaggccttcactggatctgtaggttaatgaggtcccactcatcagttgttatttttgtttaattgcgttcaaggacttagctgtaaacgctttgtcaatgcctataacaacaggatgtttcctgtgattttttttttctttgagacagagtctggccctggcaccggagacacttagagtggggagagagggaggagggcaagggctgaaaaagtgcctgttgggcgctatgctcactacctgggtctacggattcattcgttctccaaacctcagcatcacgcaatatacctttctagcaaacatgcgttatgtgcccccgcattctaaaataaaagttgaaaacaataataataatatggaactaaaaattaataggcatgcatcttagcaatataaactcaagtacaaaatggaagaggcccacgttttagagattttgaaatttaaaacacctataaatgtgattgtatatataggcatgtagggacaactgggcttcatctgtaagaactacaggtggaaagtggagactccttactggcctgagagcaaggagacagccctgagtcttggtgtctgaggagaagaagtatgtgtttctgttcgattcttggtcagaaaaaggtgttataaagaagaatcttggttccctgtctcttttctcatgccagatacttataatagtaactatacatgtgtatatatatgtgtatatatatatttgtctttataaaagctcacatctcccaagtatcacacaaaaccctttttgtctttttttctacaccccatggagaagtacaaacaggatgtgatactctaatatcactcagttttctaaaataagtaggttgcaatttcctatgaagtgaaactattcctagttcacattgagaaagtaccagattcagtttctcataggaccaacaattgtctggaccaagggaaattacaaatggtctggtcttacatttttctccagctacctgtgatgatctct[136 bp omitted]catgatgaaaccccgtttctactaaaaatacaaaaattagctgggcatggtggcaagcacctgtaatcccagctactcgggaggctgaggcaggagaatcgcttgaacctgggacgtaggaggtcacagtgagctgagactgccctactgcactcccagcctgggcgacagtgttagactctgtctcaaaaaaaaaaaaatgtgtatcactcaaactgacaccttcatggatcttagaaccctgatcatgttcccatgagaattccattcattccattcaagaagatctaactttcacatatacaccatggaatactatgcagccataaaaaatgatgagttcatgtcctttgtagggacatggatgaaattggaaatcatcattctcagtaaactatcgcaagaacaaaaaaccaaacaccgcatattctcactcataggtgggaattgaacaatgagagcacatggacacaggaaggggaatatcacactctggggactgttgtggggtggggggaggggggagggatagcattgggagatatacctaatgctagatgacgagttagtgggtgcagcgcaccagcatggcacatgtatacatatgtaactaacctgcccaatgtgcgcatgtaccctaaaacttaaagtataattaaaaataaataaataaataaataaataaataaataaataaataaaaaagaagatctaactttcctaaatatctatgcatccaacacagcagcacccagattcataaaagaaatttgtaaagaccttcaaagagacttagactcccatacaataatagtgggagactttaataccccacttacaatagtagacagatcatcaagacagaaaattgactaagataatcaggacctgaactcagcacgatagatatctacagaactctccacacccccaaaccagaatttacattcatctcatcaccacatggcacatgctctaaattcaatcacataattggaagcaaaagactcctcagcaaattcagtttgttacaactgaaattggcacaaaccactctctgaccacagcataatcaaattagaaatcgagactaagaaactcacttaaactcatacaattacatggaaattaaacaacctgctcctgaatgacatcagggtaaataatgaaattaaggcagaaaataagaagttattacaagctaatgggagcaaagatacaacatgccggaatctccgggacacagctaagggggtattaagaggaaaatatatagcactaaatgtccacatcacattagttgtgatgacctaacatcacaactaaaagaactagagaacgaagagcaaacaaaccccgaagctagcagaatacaagaaagaaccaaaatctgagctgaactgaaggagattgggttccttcacacacaaaaaaatcattcaaaagatcagcaaatccaggagctggttttttgaaaaaaataataaaatagactgctagctagactaattgaaaaaagagaagactcgaataaacacaatcacgaatgacacggggaatattaccattgaccccagagaaatacaaacaaccatcagagaatataatgaacccgtgtatgcacataaactagaaaatctaaaagaaatgggtaaattctcagacacgtgcagcctcccaagactgaaccaggatgaaattgaattcctcaacagaccaataatgagcctgaaattggttcaacgtacacaaatcaataaacagattcatcacataaacagaactaaaacaaaaaaccacatgattatattaatgatgcagaaaagccttctgataaaatttaacatcacttcttgttaaaaactctaattaaactaggtattgaaggaacatacttcaaaataataagagccatttatgacaagcccacagccaacatcatgctgaatgggcaaaagctgaaagcaatccacttgaaaactggcacaagaatgccctctctcaccactcctattcaacagtattggaaatactaggcagggcaattgggcaagagaaaaaaataaggcgtattcaaataggaagagaggaagtcaaactatctttgctgcagatgaaatgatcctgtatctagaaaacatcaacccaaacatcaacctgagatcttcttaagctgataaacaacatcagcaaagactcaagatacaaaataaatgtgcaaaaatcactagcatttatataccaataacagtcaagttgagagccaaatcaggaatgcaatctcatttacagtttacacacacacacacaaacacacacacacaatacctaggaatacagctaactaggagggtggacaatttcttcaaggagaactataaaacactgctcaaaaaattagagatgacacaaacagatggaaaaatattccatgatcatgaataggaagaatcaatatcttaaaaatggccatagtgctcaaagccatttatagattcagtaatatttgtattaagttatcattgagattcttcacagaactagaagaatcatatggaaccaaaagttttaaatttaaaaattcatatggaacccaaaaagagctcaaatagtcaaggcaagcctaagcaaaaacaaaaaccgaaaaccaaagctggaggcattatgttacctgacttcaaactatactacagggctacagtaaccaaaacagcatggtactggtacaaaaacaaacacatagaccaatggaacagaatagaaaacccacaaataaaaccacacacctacaactatctgatctttaggaaacctgacaaaaaaaaagtgatggggaaaggattccctattcaacaaactgtgctgggataactggctatccatatgcagacaattgaaactggaccccttccttacaccatatacaaaaaaactaactcaggatggattgattgatggatgtaaaacctaaaactataaaaacctggaagacaacctagacaatacattcaggacacaggcacgggcaaagattttatgactaaaatgccaaaagaaattgcaacaaaagcaaaaattgacaaatgagatctaattaaaccaaagggtttctgcactgcaaaagaaactgtaaacagagtaaactgacaatctacagactgggagaaagtttttgcaaactgtgcatctaacaaaggtctactctccagtatctttaaggaacttaaaccaatttacaagaagaaaacaaacaaccacattaaaatgtgggcaaacgacatgaacacacgcttttcaaaagaagacatacatgtggccaacaatcatataaaaaaagctcaacatcactgatcatgagagaaatgcaaatcaaaaccacaatgagataccatctgatacctgtcagaatggctattattaaaaagtcaagggacacatgttctcaggacctcctgagtgctgatcactcatatttggctcagaaaaatctcttctaatatattacagagtttgactctttttgtccacaataatttggtgcctgaacacgtgaggcctcagataagactcaggaccccaaaggagttgtctcaacctggagctaaggtaccagcaggggcccactgaaagcctccaggattttgagcttcttctctgccagaagtggtaagtcctcctgagccccgacctccctttggttgacggccctttatttattctgatctactatttctttttctttctaggaagttgttgtttaaggatcctacttctagttgggagatacattctaaagggtcttctccattgcttttctccccaaattaatctcgatttggcttgtctgttcacatttgcatgaggaactgaactgttgttttcatagggaaacgagagactgtgtttcctcagcttaaaaaagaaagggcattttgctcctcccagccaaaatgtgggaagtgatgaggggtgcttgtgggaatgtctgggggtggatggaccccatcgtgatgtgagtggcctacagggaacacccaacaaaatgagttttaaaaaggcttgtccaggaagcacatatgggagctggtcactctgcattttgggccctcctggaggtgtttagaccttccgagagagaaactgagacacatgagagggaagaaatgactcagtggtgagaccctgtggagtcccacccacaaccagcacactgtgacccactgcacaaacctctagcccacagctcacttcctcctttaagaagagaagagaaaagaggagaggagaggaggaacagaaaagaaaagaaaagaaaaagtgggaaacaaataatctaagaatgaggagaaagcaagaagagtgacccccttgtgggcactccattggttttatggcgcctctactttctggagtttgtgtaaaacaaaaatattatggtctttgtgcacatttacatcaaggtaagagagccctaatggcggcttgcacgctatagagttcctaagttctctctttctctattttcttttctgcctgctttacatctgctgttacctttctactgagataaaaaccactgtttagatccaaattttttttgcaagctggtaaatttatattaatatctcatggctagagttttgaagtaaaagctacaggatgtctgtgtgtgtgtgtgtgtgtgtgtgtgtgtgtgtgtggtgtgtgtgtgtttaaaagcctttatgatagatttgtataattttatgtttaattggcagtgaacccattttaatttccctctaacacaccagacttcttcctctgtactttgagatgtaagttttgctgattttttctcctaaaaagtgtttcctgtaacatggaaatttagggttatttagctgacaactgcctggggtaaggaaacaggttatgaagagtttgaaagggttgggcgtggtggctcacacttgtattcccagcactttgggaagctgaggtaggtgactcatgtgagatcaggagttcaagaccagcctggccaacatggtgaatccctgtctctactaaaaatgcaaaacttagccaggcagtagtggcacactcgtaatcccagctacttgggagactgagacaggagaatcacttcagcatgggagatgtaggttgcagtgagctgggatcatgccactgcattccagtctgggtgacagagtgagcccctgcctcaaaaaaaaaaaaaaagaaaaaaagaaaaaaagaaaaaaaaagagtttgaaagtttgagatagaaaaaaaagaggttttttgaatctataagatgtacttctatcagcatgcctaatgcgtccatgaatctgtgtgtggtgtacataatgtttcactactaaaaatatacaaaagagctctaattaattggcttaaagagaataaaagtgcttaaatcaaatactttatcaggacaagatgcttcttcaagttcacttaagtaaaatctttaataaataagctggctttaaaattattggtaaaataagattagaaatgtcttaagaattgttagcgtttttgtttgcacttattgcacaagtggttttgtgcttatccctgcagaatagtataagattttccataagggttataaaactataaacctggccgggcacggtggctcacgcctgtaaccccagcactttgggaggccgaggctggtggatcacctgaggttgggagttcaagagcagcctgacacacacaaaacaaaattataaacccagcccaaaacagaatgatctttgcttgtataatttttaataaataagccatgtaatattgttggttaaataaaaacagctaactactgagatattggttaaaaaaaataactttatatttaaccataagttcccttacttaggtaaacacctgaaattcatagtttataacattggttaacagggaattaactttaagtgatgactgtcacagtgttcataaataatctaggtaaactattaaataagtttatcaagtaaatgcaatggaataaatgcctataaacaaacttgtcacataatttacaatctaaagttatattaaataatagatattaattgattagctgggtaatttataatttaaaaattacaggaaaacatttttaaaaaacaattcttattaaaagataaatatctgtgtttaattcaaagcttttttaaaagttatgtataaaacaagataaatggaaacaggaaataagagatgtaaagacagttataaatataaagaggaattttggtaaaaaagatgaaaaggaaagtaattttacacaagaaagtcttatgtagtgaatttttgtcctgaaataaaataactgatagttcaagaaagagggatatttaggacaaaacaggcagtttaagcatgttgtaagtggtctctgtaagtcacaataagactttttttaaaaaaagaaaggtagtgtaatgtagttggttatgattaagaaatataatagtcattctacagatgggtctttgatatttaaaaaacacaccctaatccaaaactaaataattggttaaaacaaggttttagtaaaatattaacttattcttaatgcaaaaagtttttaatttttaaattctataatctgtctttttgaaattcttccaatgaatatatcaaagttcagctttttctcttttgaaaggccttggatgatagctctctccttcaccttgtgttggcttctgtaacttttattaattatctaaagtaagagaggaatttttatttaaaaacagaaaaatgaaatatcctttagacctgctttttttcttctgtatgcctgttatatctgtatcttcatatgtgttatctggaagtgatatttcactaccaaactacatgaaacagctcatcagttgtcttttttaaaaaaaagtaagtgcttatcagattggcagacactagctaagatgcctttgaattcacctgattttaatatttagtaaaattaatttagtaaatttaatcttaaaactctctccagtaattagagctatgttatgttaaacctcgttttttttttttcacttgaaatttgggttactaaattaaaatagtaggagtataaaatgtttttggtgatgcatataaaacacaaggatataggttttgcaaaaaaaaaagtaggtttttttctagttaagaaactatttaagagttgctttaaaatgaagaaaaaattacggagataaaactaaataaaaagaacaatttagccaggacaacaaaagttaactctgagacctgtgattaccaagaagatagttgatatagaggaagggcaaaaacaagtaactattaaaaccagagggtataatgcaaaggaattgttctgctttttagattgttataatcagtttcttaaaaataatctatgtggtagattgtaaaaaataaccactttaagggccaaattcttaattttttttttgagatggagtcttgctctgttgcccaggctggatggagtgcagtggcgtgatttcggctcactgcaagctctgcctcccaggttcacgcccacattcttaattttaaatgcttcagaatttaagagcttgtttggattgatgcaggacccgtagctcactattaaacaatcactaatgagtatatgagatccaaatgcacaggaggttattccagagagaacaaccagcttagtggaccagacaaacgccactgaaaggtctgttggccctgagaaggggactagccaactctccctataaaacaccaagtgcagcatcccagatgaagcagtgaatatgctttgtatgcgagccaggtggggctggtgtatgaagcatatgaaccaagtaaccattaaaatcaatcaaccgttggtggacacttagtttggtttcatgtctgtgctgttgtgaatagtgctgcaacaaacataatgagtgcagttgtcttatttatttatttattttttattttttgagatggagtttcattcttgttgcccaggctggagtgcaatggtgccatctctgctcactgcaacctccggctcctgggttcaagcgattctcctgccttagcctcccaagtagctgggattacaggtgctcgccaccatgcctagctaattttttgtatttttagtagagacagggtttcaccat[138 bp omitted]taccatgtaatgggattgctaagtgaaatggtagttctatttttagttgagatagctccatattattttccatagaagataaactcatttacattcctaccaaccatgtatcttgctaacatctgttggttctgacttcttaaaagtagccattttgactggtgtaagttgatactcagtgtggttttaagttgaatttctctgatgattaatgatgttgagcattttttaatgtgtttgttggccacttatatttcttgttttgagaaatgtctgttgatggtctttactcagttttccataaagttgtctgtgttttttgttttttttttttcatgttgaattctttgacttccttgcagattctggacattagtcttttgttggaggcataatttgcaaatattttcttccattgtgtaggttgtctgttcattctgttgattgtttcttttgctgtgcagtagcttttaattttaatcatgtctcatttgtctattcgggggtttgttgcatttttaagggtctttaccataagttctttgcctggactaatgtccagaagggtttttcctaaattttgctttaggaattacatagtttcaggtctcacattgaggtctttaattcatcttgagttgatttttgtacatggtgggagataaaggtccagttttattcttttgcatatggctacccagtttttccagcatcctttattgaatagggtgtcctttccccattgtttactttgttgactttagcaaagctcagtatgttgtaggcatgtatctttatttctagtttctctattctgttcccttgatgtctgtgtatatttttgtactagtaaatgctgtcttagttactatggccttatagtataacttgaaatcaggcaatgtgatgcctcctgttttgttctttttgcatagaagtgttttagctgttcaggctggtttttggttccaaatgaatttaaaaattgctttttctctaattctgttaaagaaatgacatttgtaatttaataggaattgtgttgaatctgtagtatgctttgggcaatatggtcattttaacaatattgattcttcccatttgtgagcaaggaatatttttctatttggttgtgttgcctacagttcctttcatcagccttttgtcactctctgtgtagaggtctttcacctccttggttaaatatactcctcagtgtgtgtttgtgtttgtgtgtccttaatttgattctcagcttgaacggtactgatgtatagaaaagctactgatttttgtagcttgatttttttatccagagactttactgaagtcacttaccaagtctacgagtcttctggaagaatcttcagggttttctgggtatatgatcgtgtcatcagcacacacagataatttcactttctcttttccaatgtggatgcactttctttctttctgttgcctgattgctctggctaggacttccagtactgtgttgaataggagtggtgagagtggacatccttatcctgttccatttcttggggaaatgctttcacttctccccattcaattttaaggttggctgtgcgtttgtcttataaggctcttattttggggtatgtttctttcatgcctagtctgttgagggattttatcatgaagggatattggactttctcgaacgctttatctgcatctattgagatgaccatatgctttttgttcttagtttatgtcatgagtcacttttattgacttgcatatattgaaccatcctttcatccctggaatcaagccaacttgatcatgatgaattatgtttttgatacactgttagattccgtttaatagcattttcttgaggatttttgcacctgtgttcctcaggtttcttggcctgtagctttatttttctgttggatccctgtctgattttgctatcagggtgatattggtttcatagaatgagctaggaaagaatcccatcgccttgattttttggaatactttcattatgattggcaccagctcttcgttgtgtatatggcaaatttcgactgtgaatccatctgttcttgggcttttttgccggaagatttttagtactgattctttttggttacttgttattggtctgtttagggtttctattttttgcctgtgcgatcttaggaagttgtatgtgtctaggaattcatccatttctctaggttttctagtttacgtgcataaaggtgttcatagtagtctctgatggtcatttgtatttctgtggcgttggttgtaatgtcaactttatcatttctgattgtgcttatttaaatcttctcctttttttggttagtgtagtcagccatctctcaattttatttatactttcaaaaaaccaacgttttctttcactgattctttgtaatgtttttgtctcaatctcattctttatctgtcctttcagagtttccattgttttcagcatccatcactagcaagccagtgcgatcctttggtggtgccacaatattcagatttttcacagcgtcagaatccttacactgattccttctcttctggagaggcctccacttactctcttcgaatttattttcatttggatgggatttgttttgcacattttcccccggccccgcagggagggtgactgtagagcatgttgggaagggtcttttggcttttcccatggctttgggagcttctgcagcagggtttgtgttgggctgtgcagctcaaattgcaggccaggagctggtgcttaagggtaagagccaccctcggcacaagcaggtggatatggacctggtgtgtttcctgtgaggtgctgactgttgtttcaggggaagggctggaccgtggagtgtcaggtgccctgagctttgtgttccacaggggcgagggaacacccctgggcagagctggaacccccggcttgcccacagatatcccagtgatgagtgcaggcactagtcctgatggacatggctggagcagctcctagtgaaatgccctgaggtctctgcggggggtgaaggagctacaccgtttccagtcccatagggaggaacgttgtctgtctccctatcacacccgtgctccagggctcatgagtctcagttcagacacacacttttgtctctccccaggccacagtgtggctgagggccgtgggaaacacctgccttgccactctctgcaggcgtggttccaaggcagagcctcctccctcagcccagtgcagaccctgagcggctgtctgttgtctgacgtggtagctgcttcatgtaggtgggatgtggggcttctgcctctctggatgggagagtggacgtcagttgtggtggtgttgctggctgggtgggcccgacctcaggccctggggtgagtggtcaggtgccagcagggtaggaaagggcaggtagttcccggatcacaggcccctaggtggccggctggacagcgtgtgtgagtcctgaaggggctggactgggttttggctgctccggggttcagatgctggctgtgatggggagggatgggctggtccccagggcacaggcagaaccctcaggcggggcaggcagaaggctcaggtggtagagcctgcggcagatcacagacctgtggggactgggctctcagaagggctgggggctgcagctgaaatgtccaggtgggggcagggtggctgtgctgtgggcctgtcactagggagggcagggcccctctgctggggcactggagactggcagctgtgaggcacagggcccgctcacacttccctcctgaagaagtgtcactcggttttgctctggggacacgtgaaagtgccaggcctccccacaccctccctgggcctggggcagcagggacagaggcagaggtggcagtgactgcaaagggcttgtcaggggcctctgagcattggactttcagagggcactgagccagggccacggtgttcgggtgggggcaggacgggtgactggggccctgcagctggcaagccccattagcaggaaggaagccccatttcgcaggaagcaacagaggtgggcagctgtgtggtgctcagcttggctgctcctgtgccccagctgtcatacttattctggggcccacagaggtgcctggcctcctccctccctgctaaggcagtggcagctggacccaggctgctcagggatcagaagcctgtgggattccacgtgggctccagaggcgcctctgcaccatctctgggaactccctgtgcctctgtaggccaaggggggtcaggggctctcctgtgaccaggattgtaaagggccaagacaggggtgtggatcccaggggcctcacacccactcaatctttccctttgttaaggagcctctcactcactcaccccttccccgtgttagggagcctcgcactcactcaccccttccccgtgttagggaccctctcactcaccccttccccgtgttagggagcctcgcactcactcaccccttccccgggttagggagcctcgcactcactcaccccttccccatgttagggaatctctcactcactcaccccttccccgtgttagggaccctctcactcactcaccccttccccgtgttagggactctttcattcactcaccccttccccatgttaggagcctctcactcactcaccccttccccgtgttagagaatctctcactcactcaccccttccccgtgttagagaatctctcactcactcaccccttccccgtgttaggagcctctcctggctcccaccttttctcttctcttctttccatgtcctcatgtttctcaggtgaaccccagcatcctcttggaagatccacttgacctgttggtatttactcactattttgggtcctcttagtgagtaggcagactccagccctttccattcagccaacttgaacctcagcccacaatcattttcttgtcactttttactcttgggaaatccggtcccaatgtgcttgtctttcatttgagaataattttcattttctccagtagttttaaaattactttgtatctattctaggtatcttttactctatcatagttaagacattgatgttatttattaatttgttcacattaaactcatgttctttcttcatttctgtaaaaatgtcaaccattttctttgcaatatttactgaataacgtactccttatttccttcattctgaaagtgtgatccatagagagatacctgtttcctcttctcattccatttcttgtgtgcattaattatgttttctactttattcatttctagtttttctctgatgactaatgaaaaatttaatagatattccacaccaatactatgctcatcatttcagctgtgtcttgttcttgatgcaattatttctaaatgtgttgatatgatttactatttttcacctcacagtagcttcctaattcatttctataattgcctgttttttctgtaatggactttttgatttttatttctcttgggtgggtttttctcccacacatgtgatcttccatacagtttctccccgggctgactcaggaaggaaagctgatgaggagcattgctgtggtcactcctgccctgcggtgtccatgctgccaagcttagaatcagctctgtgttctgtccggcatggtggggcccatgtgagcctcacactcacgtgctagagatgcctggtccagcagtgataaagcgcatctgtgtcatgcacacccgggaaggtggctcaatgctgagtgtggcccgggtcactgaggggagctatcccagggtctgtccacaaacacagaagagggagaacaacagtctctctagggtcccacggtttcctccattttttgctttgttctgagagagagacaaagtgccatggctgctctgtgggttggacagatgcatgctttcacctgcaggctggaacccaagctgaggtcttcagcatccccaagtactgataaagcactttaggttgtttttagaaaacactgaaaaattaacccttttgctaaagaggtagaaacaagccctcccctcaacgaaattcctgaaactctcaggttaaacttcgtaacccaatcccttcactgcagacacccaataggaaagtcacatgtgcaaggatgagatgactttggtcaagctcagaccccacagggccaggaaggcctgaaggagaggaggcccatgcttccagctctcagataagagctgcttctaaggactttttaaaaaccccacaagaaacccttccatgtccttcaccccctcctgctttgacgaggtttatcactagatattctttaggatgtcaggaattcagataagatgctctcgagaaaaaacttgcccagcaacggcatctcctccaatggactgacagcaactctggctttgaacctctggaatcagggaactctgtttctaagcagctctgtcagcctctctcttgttgctgataagaacttcctttacttctgtatgtcagagagctctctctatggtgcttttcctctactctcacaccacaggaatcatcctcacagaagaagacttctaggaccagatgtgtgggattttttttcctagacccagtagcggacgccagctgagtgtttaaatgcttcttccccagtgccgtaaacaaatagcacttgaacataaatttaatttactcagcaagaccatttttattttctgcagcaagggtacactcaccagcagttttgcttcgagagtacacaaaacaaaagagacagggtcatttataacctgacacgtccaccctactgctctgtccggtttccactggctggaacaggacctcacactctgtatttgtcccgattggctagtaacttagaacttctgaaaagaggcaaaggtagagcagaacaaaggaaggaggaagtaacttgtggaatgctgagaaaggtgaaaacaccttcaaataaggaagaggaacaggctatgacctaatgcttgcttggaccagtataagcatgccagggcaaatatttaggctaaattgtgggagctaataacataaagtacattgatttatttatcacggctagcagatatttgagaatgttagcatagctctgacactgtctacccagagacagtcccagatcccacagattgaatggttcagtccccaacactgcccccacaccattcccaagtccagacctccagaacttctgactgactggcttcaagttggggaccctatgaccacctctttgggtttgattaatttgctgtagcagctcacagaactcagagagacactgacgtttcctggttgaatacaaagcacactgcagaggacacagatgaagagactcataggaggaggcatgggggaaggggcgcagggcttccataccctccctgggcatcaccctccaggagtctccacatgctcaaccacccagaaacccacgaaacccagtcttcttgggtttttatgaagcttcatgatgtcagtatttcctcccacaaggaacaggctgagaccatcttctgggagggtcttaagagccaccatcagaaaggcagggacattagagtcttgccttgggcaggtgaaggaagggcaggaggaggtcagaggcctcccctaaggcctaacacagccaatgttataacaaaagactgtaacaagggctatggagctatgagccaggaaccgcaggtgaaaaccagtgtgtatcacaacatcacacttccctctccggacacactgtggcttgccatgccatgcactccagattgtaatccttgcttctcactcccaaataaactcaaaatccagacaaccctggagcaacgcagccttgaattcctggggtctcttatatgcacacttttttcaaccaaacgggggtcaaaactgtagcatttgtgggatgcaagacttgtgtatatgaacggcagacttttcctatatgcaggcccagcagagacaatgtcggggctggagtacgagcaggtgttggtgcatgtagcgggtactgaaacgaattgcctgtgtatcccaagaaacaactctactgagagatcatattctctaggggtttatttttgtttttatttttattttaagttaaagcttcgggtagaacacccagtgtctccttgtccatctgaagaagatgctgctatgtggaagcacatccttgagatccacaaggagacactgggcaaggagacgagggtgccccactgtgcagaagtctccctaataaatgatctatgaacaccctggtgtttagtgcttctttctttggaatcccagcagctctgtcactggacggtttggtgcactcccttgagggaattcccctgggctgcttggggtccactccagcctcaggtgtagctggaggacgcagcctcccaccttggtctggagccctgagcccctcactgtcattgcagatcccgaggttcctctcctggctccactcagtggtggaaacctccaccctaatgagcccttgatggtcccaggtccctgtggcatctcacctgtggcctctgttctttcctgtggatccatctacacttgggaacttccacatctctttttctgctcatgacattgatgctctgggtatttcagaaatgcccagatagatggacaaatacacgtccatctatccattagggtcagatgtgagatccagagtggacacatcaatcacctacgtagactgtggagtccaacgccaagatcctcttatgtcccaaacacctcaggtcttaccctggtctggaaatcaggcacaaatgagcccctcctaatgttccagcaccactgaccgtacaaccactgtcacgagtgggatttgtgacaacagtcggcaaaggaagaatctgaggctcagagatggttcattaccgcccgaggtcacgtaggcagtggatgataaccagtcgttgaataaatataactcccccccaactccccaaatcaaagctcaaatataagtcattgttcccaaagcgttgaacagggattgaggtgcagagggacggccaagtaagcaaagggcaccgaggaggcaggaaagactcagagatttgttcccggggggtggggttggacactgtagcaaaatattttaaaaaggggaagttaagaggggactatttggttgaaagaaaacccacaatccagtgtcaagaaagaagtcaacttttcttccctatttccctgcatttctcttctgtgctcactgccacacgcagctcagcctgggcggcacagccagatgcgagatgcgtctctgctgatctgagtctgcctgcagcatggacctgggtcttccctgaagcatctccagggctggagggacgactgccatggtaaggaccccacaacactgagctgatggacggctgaaggagggagggtgaccatgtgggaggctgtgagaaggaaggagatgcctccgctaccctcgtcaggaagggcagacacaggaaggaaccagttttatttgctgctacatcctggctctcagtgggatgaaaacaaaccagacagacggtggctgggggtcaggaaagggcccattaccatctgaaatgatgcagagggcctagtgactgcccccacctcagccctaatggaatgagagcaagggtcctggggagggcagttccacttcctgtgtggctgcagatgacagcaccccatgagaagaaggacccagcctccgattggccacactctgtgtgtctctctatcctgccagcaccgagggctcatccatccacagagcagggcagtgggaggagacgccatgacccccatcctcacggtcctgatctgtctcggtgagatttgaagaaggaggggagcttctaacctaagagggacctcaccccacagccaaactcttgtccctaaggagaccccaggggctcacaaagatcccagggaggggaggacctgcccaggcttcagggggcaaatccctcaccgggaactctcttccagggctgagtctgggcccccggacccacgtgcaggcaggtgagtctgtccccagctcttccaggtccctcctcctcactggggacaaggggccacccccgtgccgctggggatggggaatagcagttctgggctgactgatgggggcgtctggagggtcctgggctgagagctggaatctgctgggttgggtgggaaatgagttagaatctgactcctgatttccttccagggcacctccccaagcccaccctctgggctgaaccaggctctgtgatcacccaggggagtcctgtgaccctcaggtgtcaggggggccaggagacccaggagtaccgtctatatagagaaaagaaaacagcaccctggattacacggatcccacaggagcttgtgaagaagggccagttccccatcccatccatcacctgggaacacacagggcggtatcgctgttactatggtagcgacactgcaggccgctcagagagcagtgaccccctggagctggtggtgacaggtgagctgacactcaggggtcccagccccagactctgccctcaggaagggggacggctctcaggggcttctccctctcacagcccagccctggggatgacgcgggtggtctgagccacatttaacacggtgcctccttctctcctaggagcctacatcaaacccaccctctcagcccagcccagccccgtggtgaactcaggagggaatgtaaccctccagtgtgactcacaggtggcatttgatggcttcattctgtgtaaggaaggagaagatgaacacccacaatgcctgaactcccagccccatgcccgtgggtcgtcccgcgccatcttctccgtgggccccgtgagcccgagtcgcaggtggtggtacaggtgctatgcttatgactcgaactctccctatgagtggtctctacccagtgatctcctggagctcctggtcctaggtgagaaattcacagcattgcctggagttccctgagtctccaggcaggtggggagcagccgcgtctcagggcagttccaggtgggatgatgttggggcgagagggctcagggctcctggggccagagacacaggaagatcagcagtgatgtggccccgggggaaagggaagatttgtggggaagcctgagggtcggctcctggaaaccatgaccaccttttcccaggtgtttctaagaagccatcactctcagtgcagccaggtcctatcgtggcccctgaggagaccctgactctgcagtgtggctctgatgctggctacaacagatttgttctgtataaggacggggaacgtgacttccttcagctcgctggcgcacagccccaggctgggctctcccaggccaacttcaccctgggccctgtgagccgctcctacgggggccagtacagatgctacggtgcacacaacctctcctccgagtggtcggcccccagcgaccccctggacatcctgatcgcaggtgaggagcccagcgggttcagtcagggacccaggctccgcacaggccctgccgggggagctcaggtagtgatggccgggatgagggatgggggtcccaagggagggagagacagacagagacaggggatgggcggggagggggagactcagagaaaacagagacagagacactgagggtcccagagggagacctggggaggtgtcagctcagagcaaggtggggcagcccctcgcccatccttcttctctccaggacagttctatgacagagtctccctctcggtgcagccgggccccacggtggcctcaggagagaacgtgaccctgctgtgtcagtcacagggatggatgcaaactttccttctgaccaaggagggggcagctgatgacccatggcgtctaagatcaacgtaccaatctcaaaaataccaggctgaattccccatgggtcctgtgacctcagcccatgcggggacctacaggtgctacggctcacagagctccaaaccctacctgctgactcaccccagtgaccccctggagctcgtggtctcaggtgggggccttgaccctgtcctctctgagctcaaagtctcagctcagaccctgccccaggagagctctgggctgggatggagtgagcgggggtctgagaggggctcagccagtgggagactcaccctcagagggaaggaggagaacagggccctcccaggcctgcccaccctcagtggcatcgccagcatcatggacaggagaggcgggtggagggaggggcctggggaggccacaggtcccatgtagagaaatttggtttgaggtggagacttcaggaaagccccagctcctcagcctcctctcattcttttacccaggaccgtctgggggccccagctccccgacaacaggccccacctccacatctggtgagtccctgaggcttctgaactcaagggagtgcggcctcccccagggcagccctgggtctcccagagaatcccattcccctcaaagactcgagcttccctccagggagccgggcagagccagaggaggggccacagggtccccagggctctgaggctgggctggtgaggggtggggggtcaaggcagagagaaatgttggggcccagcctgggggaggagcagccgggctgatgtggggagcagggcagccccagccctcacctccccgtcctgacccagcaggccctgaggaccagcccctcacccccaccgggtcggatccccagagtggtgagtgacgggctctgagtgggaggtgggcagggtccaggggaggcaggggtgggttctgtcctaggttcagtctcctctggaggtggtgatatagacaggctcctcccctgcttgggcctcagtttctccaaatgtaaaggtgagaggcctgcgggtgggaaagttcctttcagctctgactcccagctgtgacctcctgggagaggaggcctcccagggaacctcccagacccgattccgcgggggcctgtcccgtcccacctgcagcagagacggtgacctggggcaggggaggggagaagagtcatggttcaggacggtcaggctctttccctgcagctccggggctcggctctggtgcaggaacaagggctgcaggtcagactcctgggcttccttcccagctctgccgcttcctggctgggggccccgggcaggcgattcccctctctgagcgtcagtttttcatctgtacagtgggtggggtggatgtttctgtgctgcacgactgttgtgggggttggaggtggtgaacagaaggtccagcagtcacctgcacacagtaggcgctcatttcaatgacatcacccccatccctgacatcatcgtgctcaaggtctgggaaggcacctgggggttgtgatcggcatcttggtggccgtcatcctactgctcctcctcctcctcctcctcttcctcatcctccgacatcgacgtcagggcaaacactggacatcgagtgagtagggaatggggggaccctgagggctgaccgagggtgggctcagggcacagccaaagagaatccaaaccactgggcaaatgcagctttgagaaactgttccagcatttctcaccaggccaatcgacagtcagtcccatctacaaatgtaaagtgtccttcgggctcagtgccatctacaaatgtaaagtgtccttcgggctctgtccatcctatgaggcatttggaacatggaggcaggagtgtttttaggtttccttccttaccttcgagctgtgtgtgcagggcagggggctccaatgttcccagggctgaggctctgtccttcttcccccagcccagagaaaggctgatttccaacatcctgcaggggctgtggggccagagcccacagacagaggcctgcagtggaggtaattctgcccgaagaccccagactcccacctgctcgtggcccatacactgcccctaaagctcccattcttcccccaggtccagcccagctgccgatgcccaggaagaaaacctctgtgagtgagaggaagaggtgaccagccaggagggagatgggggccccgaagtttccgtagcaatggggaaaggggcgctggctggaaagggtctggggctcagggtgagatcatctcaccccacactgtggggcctcagggacatcgcagcccctccctgcatctcagtggccccatctgggagctgagcaggggctggcaggactcagaggtcccagggaaccttcccaagagacaaaccccttgctctgccccagcagatgctgccgtgaagcacacacagcctgaggatggggtggagatggacactcgggtgagaccccacccctgtcccaggcaccaaaggcctcctggtgccagatctaatcctgcagaacttctctgtcctccttcccccggctctcagcatcgtcacggtggacccctccttgtccagcacgctgcctcccgcctgctgcgacctcactctctcctgctgtcctgggacctcgtgggcctcctcccgggtccccttcctgctcctcatcctctgtttggccgtctggttgttagagctctccccaggcctcaggaggatgaggaataaatgaaccaccccggtcccccaggctccccttcattcattcaaccagcaagtgttcccagggagctcactgtggatggggctccccatgggagctgcagacacagcagggaggaaagccgcccccgcctcctgagctcacctcgtggtgggagacaaaatgcaaataaatgtgccgcctccaggagtgcaacgtgctgtaaggaacataaaccagagaaagggcagagagtgtggggcagtggggccagtctgaatggaaggggagggctgtctgctcagctgtcatctgagaagcctggacagagtggggcacacgatcctctgatggacgagcccctgcaggcagaggaaacaaccctgcaaaggcccccaggcagcagcgagctcttgcaggaaggcccgtgaggctgcagccaaatgggcaacgtcagagtgaggagcagaggccagaaccacagcgagggagcggccagaccctccacggccttagggcgtccctgagattccatcgggaaagggatgtaatcggatcacccggggaacagtgaggaaaattgactccagggggtcaggaggattcaaggacaccccccaccactgtctctctccagcagagcccacacgatgaagacccccaggcagtgacgtatgccgaggtgaaacactccagacctaggagagaaatggcctctcctccttccccactgtctggggaattcctggacacaaaggacagacaggcggaagaggacaggcagatggacactgaggtgagtcctttcctctccaggcccccaggcctcccccacccccaccacgttccttccctctcactctcccccgctgcaggctgctgcatctgaagccccccaggatgtgacctacgcccagctgcacagcttgaccctcagacgggaggcaactgagcctcctccatcccaggaagggccctctccagctgtgcccagcatctacgccactctggccatccactagcccagggggggacgcagaccccacactccatggagtctggaatgcatgggagctgcccccccagtggacaccattggaccccacccagcctggatctaccccaggagactctgggaacttttaggggtcactcaattctgcagtataaataactaatgtctctacaattttgaaataaagcaacagacttctcaataatcaatgaagtagctgagaaaactaagtcagaaagtgcattaaactgaatcacaatgtaaatattacacatcaagcgatgaaactggaaaactacaagccacgaatgaatgaattaggaaagaaaaaaagtaggaaatgaatgatcttggctttcctataagaaatttagggcagggcacggtggctcacgcctgtaattccagcactttgggaggccgaggcgggcagatcacgagttcaggagatcgagaccatcttggccaacatggtgaaaccctgtctctcctaaaaatacaaaaattagctggatgtggtggcagtgcctgtaatcccagctatttgggaggctgaggcaggagaatcgcttgaaccagggagtcagaggtttcagtgagccaagatcgcaccactgctctccagcctggcgacagagggagactccatctcaaattaaaaaaaaaaaaaaaaaagaaagaaaaagagaaaaaagaaatttagaagaataacaagttattccaaatgaaggcgtaagaaagggaataataacaataataagaggagttgttcatgaggaaaaaccaaagcttgaaaattcaacaaagccagtgaagctcattcttgaaaacatgaatcacactcatgaattctaactacaatgaaaaagagaaagaaagagcaggcatgcatttccatatgggagtgagccagcagacagccctacagatcgtacacacgttttccaaaactaacaatggaacaggcggcaaacctatgccaatatactagaaattgcagattaaatagatgaaatattctaaactggagtttacataatgaacataagagtaatcagagaatctgactcattttagatgtgtgtgtgtgtgtatatatatgtgtgtgtgtgtgaaaaacattgactataataaaaataatctcgagttcacgaagcttcattggtgatttcttacaaatattgacacactaatgaaacacacaaacacacccagagcatcacaaatgtttcttgagaatagaaaaagtggcaatgtgcccaggtgcggtggctcacgcctgtaatctcaacacatagggtggcagaggcggcagattacttgaggctgggagttcaagaccagcctggccaacacggcaaaaccccatctctactaaaaatacaaaaattagtcggacatggtggcgcacactgcagtcccagctacttgggaggcagaggcaggagaatcacttgatcccaggagatggaggctgcagtgagctgagatcccgcccctgcgctccagcctggtcaacagagccagactctgtctcaaaaaattaaaaaaaaaaaaagtcatgacatataaaatagaattttccattctataacaggcatattttaaactctacagtttttctgtttcaaaataatatttttttaaattttattttaatgttttactttattttatttggcagtttaaaattctacatatttaggatgtgcaacatggtattttaatatgcctgtgaaatcgctaggtcaagctaattaacatctgtaacatcacgtagttatctttctgttaagagaacatttaaaatccactttcttaccaattttcgcgtatgcaatccattgttagcaactgtagtcaccatactgtacaacagatctcctaaacttactcctcctgtccaactgaagtgcggtatccttcgatgcagctctctgattccaccccagcccagctcccggggaccaccttctactctctacttccatgagttcaactggggcaatccgcacataagtgagatcaggcagcaggtgtcttcccgtgccttctttattccgcgtagcgtgacgtcctctaggctcgtccatgttgtcacaaatgaaacaatttccttcttctagaaggcggaatagtttttcgctgtgtttatactgagcgcttcattttctgtatccattcgcctgctgatggacgcttggccgggttccatgtcttggttatggtggctaaagctgtcatgaacatgggagggcgggcatctcttcaacgtactgattccatttcctttagatacacacccagcagtgaaattgttgaaacacagggtagctctgatcattaacttctgaaaaacatctatagtatttttgtggtcattgtactcatttacattaccactagcggagggcagcggttctattttttctacattctcgctaacacttgttattctactctttttcatagtaaccatcctaacagatgtgaggttatagcttcttaaagtttatatgtatgtaagtatatgcctatatgtatatatgcaaatgtatgtattcatacataaacatccatacgtacatatgtgcagatacgtatgtacatatatatgcatgtgtattgtatgtatatatgtatacacaggtatacacatatatgtgtagaaagtgaaattttgcagtgagatatcacctcacagctgttagattgcctattatcagaatggtgaaagatcagtgttggtgagcatgaggagaaaaaatccttacacaccattggtggacatgtaaattaacacagccattttagaaaacagtatggaagctcctcaaaaaactaaacatgccaccaccatataatccagcaagcccactgctgggtgtataccagaagaaatgaaatcggccacagaagagacgtccacactcctaagctcattgcagcactattcacaattgccaagttacaaaaacaattctatatttttgaaaaaggattcatttctcctgtccctgtagagaaaacgggctcaaattacacattagctgagctctgagtactcactcatgtgtgtatctatgagggtgcatgttcgtgtgtgtttcagtatgtggtttttccattctgtgtactcacccatgtctgtaactatgagggtgcatgttcacgtgtgtgtgtgtgtgtttcagtgtgtggtttttcccatttttcctcccttgaggatatcgcattgtatgttttggattctttgatcttccaattaaattacatcatttagaattgctttcactaagtgtgaaacaataaaaattttttttaattgtggctctggaaataccttcctttccctttcactctgtatcaagatttgtaaattttttaaaatttttgttgttattttaagttctggggcacatgtgcaggatctgcaggtttgttacacaggtaaacatgtgccatggtggtttgctgcacctgtcaacccatcacctaggtattaagcccagcatgcattggctgttgttcctaatcctctccctgtcccaactcaccctcctccaacaggtcccagtgtgtgctgtccccctccctgtgttcatgtgatctcactgttcagctcccacttataagtgagaacatgcagtgtttggttttctgttcctgcattggtttgctgaggataatggcttccagctccatccatgtccctgccaaggacatgatattgttcctttttatggatgcatagtattccatggtgtatatgtatcacattttctttatccagtctatcattgatgggcatttgggttgattccaggtctttgctactatgaatagtgttgcaaaaaacatatgcatgcatgtatctttgtaatagaatgatttatattcctttgggtatatacccagggattgctgagtcaaatggtatttctggttctagatctttgaggaatcaccacaccatcttccacaatggttgaactaattacattcccactaacagtgtaaaagcatttctatttctctgcaacctcaccggcatctgtttctccttgactttttgataatcgcaattccaactggtgtgagatggtatcccattgaggttttgacttgcatttctctaatgaccagtgatgttgagctttgttccatgtttcctggccacatgaatgtcttcttttgacaagtgtctgctcatgccttttgcccacttattaatgttttattcctgtaaatttgtttaagttccttgtggattctggatgttagacctttgtcagatggacagattgcaaaaattgtctcccattctgtagcttgtctgttcgctctgataatggtttctcttgctgtgcagacgctctttagtttaatttgatcccatttgtcaattttagcttttgttgcaattgcttttggtgatttcgtcatgaagtctttgcccatctttgtcctgaattatattaaataaagtctttgtcctgaattatattaaataaagcataagggaaaagatgtagaagggaaagtacatgtaatggttaaggcgtctactgccaatccctccccgttcctcaagatgaagcctgacatgctgggtttaatgtgtgagacaagctgccgacaggtcgtttgcctttgtctttaataatttagattaacacagaaatcttcaccatgaatttctgaaggcctttctttagtatctcctggtgttgaatttgctgttggaaggtccaatcccagtgagcatgcaaatccattggaaataatttgcatttttacaaataaataattttaggattttttttttgtttccaggacagacttccttgtatttttttaatgagttaaaaattatataatataaaaataacatttaaaaacccacaattcaggccgggcacggtggctcatgcctgtaatcccagcactttgggaagccgagacgggcggatcacttgaggtcaggagtttgagaccagcctggtcaacatggcaaaaccccgtctttactaaaaatacaaaaattagccaggcatggtgtcaagcacctgtaatcccagctactcgggaggctgagacaggagaattgcttgaacctgggaggcagaggttgcagtgagcagagattgtgccactacactccagcctgagtgacagagcaagactctgtctcacacaaaaacaaaaacaaaagcaaaaacaacccctcacaattcagcctaggatatgtttattaaatttacatttgtctttttgcttaagattgctttggtattcgtcctctttttggttccatatgaattttaggattgttttttctaattctgtgaaaaaaatgatgttgatattttgatgggaattgcattgaatctaaatattgctttgggaagtgtgatcattttcacaatattgattcttccaatccatgagcatgggatatatttctattttgctgtgtcatctacaatttctttcagcagcattttgttgttcttcttgtagagatctttcacctcctcggctaggtatatacttagatatttttaatttttgcaactgatgtacaagggattgagttttgcagcaacctggatgagctggaggccattattcatgacaccacatccagctaatttttgtattttttgtagagatgcggttttgccatgttgcccaggctggtcttgaactcctgggcccaagtgacccgcccgccttgacctcccaaagtgctgggactgcaggcatgagccacggtgcccggcctatcatagcacttttgatcattgggataattcctcctccttgtcatttttggacacatgcttcccacatgcctcatcttccagagagggtttccaccagggctgtgctgggagttaaggctggaaaaggggagatggttccagctgccagtgccacatgagtctactcagggctgtaaccagcagggaaggtccagtgtgagcctcagactcgcatgtgggacagacgcccatgtgtgacaacgctgcagtgaatctgtttcacacacatggaggaggcggctcagggctgaccatggacctgagtcaatgagcagagatatcccagtgccatccacaaacacaggggagaaggagccacaacttctcactttcatccaaaaccccgacccctccctgtctgtgagggcctggggttctcctctgtctcatacagaggcagaaacctcccccttagtgacccccagactttgcaagtcaccagcagccgctcggctctggcctcttctgcttcttaaggtttcctgcctatgacaggaagtctcatttctcattttcttcatcggaccatggctacatatttcagacacattataagtaggttttcccaatgttaggagcagatgtgggctgttgagcatttaagttgctcaccgtgactgtgcagtccaacaccaggatccactcatgtttcagcccctcaagacttaacccggtctggaaatgtaccatgactgaggccctcccatgacccaggcaccactggcccccaaaaccactcaggaggggggttcatgacaacaggctccaaatgaggaaaccgaggctcagagatgggacttactgcccaaggtcatgcacgcagggatgaaggtgagcaattcagaaaaaattaactccctatcccaccgccaaatcagagctcaagacaagtacttgttcccaaaaccttgaaggcagactgagatgcaggggaatgcccaaggaagcggggctgggggtgggagggaccccgaggaggcaggaatgactcagaggttacttttaagggaaggggagctgaacgctattaaaaaataggaagaaaaaaagaagggaagtctaagaaggaaactggaagaaataaaacccatactccaaagacaaaagaagagtcagcatttctttatttctcctttttttctcattgccaattgcagctcaacttgaatttcacagcccgatgtgagatgcgtctctgctgatctgagcctgtcctgcagcatggacctgcaactttcctgaagcatctccagggctggatgccatggtaaggatcccgcaatgctgtgttgatggacgggctgaaggagggaaggagaccccacggggaggctctgagaagaagaaaaagcccccagtcactctcacttggacaggacagactcagaaaggtgctgtgtcctgtgtcctgacccttgatgagatgaggacagatgaggcaaatcgcagaaaagggtcagggagataccatttctgtatgaaatatctgaagacagcctggtgcctgccccagtcccagccttggggaaatgaaagccaggctcctggagagggcagttccccttcttgtggggctgatgacgggacaacctcgtgatggagaacccaggctcccagtagatttactccatccaggaactgtggtctcgtccatctgcacagccaggggctgtggaggagatgccatgacttccacccgcaaacctctgatctgtcttgatgaaattgaaagagggagaggggagactgtagcctggaaggaatcccacctcacaacttggtcctgattgaatagaagaccccagaggttcacagagatcccaaggtggggaggatctgcccagggttcaggaggcgaatctccctcaggaagctccgtgaccccctccttagtgtcgctcctgtgcctcagtgggatttggagaggatgccttagattagagggtattgttcagtgggatttggagaggatgccttagattagagagtattgttcagtgggatttggaaaagatgccttagattagagggtattgttcagtgggatttggagaggatgccttagattagagggtattgttcagtgggatttggagaggatgccttagattagaggatattgttcagtgggatttggagaggatgccttagattagaaggtattgttcagtgggatttggagaggatgccttagattagagggtattgttcagtgggatttggagaggatgccttagattagaggatattgttcagtgggatttggagaggatgccttagattagagggtattgttcagtgggatttggagaggatgccttagattagaggatattgttcagtgggatttggagaggatgccttagattagagggtattgttcagtgggatttggagaggatgccttagattagagggtattgttcagtgggatttggagaggatgccttagattagaggatattgttcagtgggatttggagaggatgccttagattagaggatattgttcagtgggatttggagaggatgccttagattagagggtattgttcagtgggatttggagaggatgccttagattagaggatattgttcagtgggatttggagaggatgccttagattagaggatattgttcagtgggatttggagaggacgccttagattagaggtattgttcagtgggattaggagaggacaccttagattagagggtattgttcagtgggatttggagaggatgccttagattagagggtattgtgtctttcagcaacaaaaccgtacaaaaaacacctgggcatttcacatcagtggataaagcatatcttgtgccaaatcaggaccaaactgcggtgaaatttagggttcacactacagttaatcacttttgaggaaagcattccaggttggtgcctatctctgtgataaacatctcccttcctggctacaggtaatggattaaagtaacactggccgaacagacactatcttcacttgatgattatactgaaaaatagccataaaattgttccctccaaatccaattccccttttgactttagacaattctctaaagaagatatacaaatggccaacaaacatataaaaaacatgtatatatgcgtatatatacatatatatacacacacacacacacacacacacacacacacacaccatggaatacttcagtcataaaaaggaacaaaataatggcattcgcagcaacctggaggcagttggagaccactattctaagtgaaataactcaggaatggaaaaccatcatcatatgttctcataagtgggagctaagctatgaggatgtaaaggcataagaaggatataatggactctggggacccagggggagcaatgggagggggtgagggataaaagactacgcattgggtacagtgtacactgctcgggtgatgggtgttccaaaatctcaaaaatcaccactaaagaacttatgcatgcaaccaaacaccacctgttcccccaaaactactgaaacttaaaaataaataaatagataaaaataaattcaccacattcaaaatgacaaccgctgaagccccagtgggcgcatgttacagggtgctcttttagtttcggccttccataggcaacttgtgtgtatcagctccattagacccctgccttcctgcaaggacagacggctctctgtatcccagggttctcgccttggtgtaccggaagaaccggatcacatgagggcttggagaatgagtgcaaggtttgattgagtggaaacagctctcagcagaagggcgatggttttctcctggagtcgggcccctggcggcccgggatcctctctgactgtcccagccaagctccatgtcgttctgccagtcggtggcctgtggtgtgctggtgcccgtccttgcgttcctctcgacatccagccatctgtgtgttcctgcactgacgtgctcctctcagccgccagtgtcttcttcttccgctgatctgcggacgtccagctgcttgtgtgtctgcctgctcaggtctcggagttgttttttttgtttgtttgtttgttttttaattatactttaagttttagggtacatgtgcacaatgtgcaggttagttacatatgtatacatgtgccatgttggtgtgctgcacccattatctcgtcatttaacgttaggtatatctcctaaagctatccctccccacccgccaccccacaacaggccccggtgtgtgatgttccccttcctgtgtccatgtgttctcattgttcaattcccacctatgagtgagaacatgcggtgtttggtttttcgtccttgcaatagtttgctgagaatgatggtttccaatttcatccatgtccctacaaaggacatgaactcatcattttttatggctgcatagtattccatggtgtatatgtgccacattttcttaatccagtctatcatcgttggacatttggcttggttccaagtgtttgctattgtgaatagtgccacaatatagttcaaccattgtggaagtcaatgtggtgattcctcagggatctagaactagaaataccatatattaatcacctcagttagttattatttctgtgtgcatgtgtgtgtgcagtgaaaatacttaggatctactctcagctaattttaagtgtacaatacagtattgttacctatagctttcattccatacattagctttccagaattattcatttcggagaattgaaactttgtatcctttgaccaacatcttatttttcccatttccagcccctgctaaccaccattctactctcagcttctatgaatttcactatttagattccacaattatgtgagattataagatatttatctattaagagttggattcatttcacttagcataatgtcatttgggtccaatcctgctatcacaaatgatctgattttcttctttttcaagactgaataaaactttatatttattatactatgttatcttaatccattcctccatcaatgggcatttatgtcatttatttacctcggctattgtgaatactggtgcagtgaattcatcagtgtggatatatctcttcaagatcttgatttgagttcttttggataattatccggaagttgaaatctggtgtcttatagttcaatttttaacattttgaggaaatgtgataccgtttctataatggatggatcggtttctgttaacttaaatcagggtattgtctttctcactcagaccgctgctggaatccttggaaattcttcactcctttacttttttagctttacttttatcacttcacagatattgagacccagagacctgattctcagccagctggtcttagccaacaacctggttcttttctctaaacgaatcccccagacaatggcagcttttggaatgaaatccttcctggacgaggctggatgaaacttgtcttctatctatacacagagtggccagaggggtttccctcagcaccgcctgtctccccagtggcttccaggccatgaagcttcaacctcagtatctctaggaggatggaactccgaattaggtccacaaagtgcattgttttctgctgccccctctgctggatcttgcaaattgtggcatatacccatattgcaatgcatgtaactggcccaatgaagagcaaaaacgtgagtatggaataaatgtataggtactctcctcacccattctaggatgattgctattcttagcaaatgcagtcattttctcccttgtggatggtatgtctttggccctcatggactacaccagcagctccatgatcctcttcttatatagacacaagcagacagtccaatgcattcgcagccacggcctctccccctgaaaatctcatgaaactagagccacacacaccatcctcgtcctggtgagcatgtttgtctcctctcatggtctagctggtattttatcactgtgggtaacctggattcagaacccaagccattggctgagaagcatctctttcctggtgtctgcaggattcccgacattcagcccctttgggttcattgtcagtgatgcccgcgtctcacagttctgcactgtctgctggacaaggaagacaaatgctccaagtgtggtctctgggctctaagttccctctagacaattgcgtcctttatttaatcacttctccccacaatatctgttggatcatacattatgccagttaatacgcaaggactttgggactcagtattgaataaaaatgataataaccatagcctcatattgcttcttaggctctcaaaaaatgaacgcagtgtaaaaattacccagatgtatgtcagttcctcagaagattaaacacagaattaccatatgacccggcaatttctgggaaaattaaagcaaggatttaaaaggatgctcatatactcatgttcataacagcgttattcacattaacaaaaaagtagaaaaaacccaaagatggataaatggataaacaaatgttatagaaactaggaaatactgttcagtctctcaaagaaatgaaattgtgactgacatacactataatatggagagccttgaagatattatgctaagtgaaataagccagtctcataaaggacaaatattgcaaatattgctaagattctatctatatgagctacctgtcaaactcacagactcaggaagtagaatcacggttaacagaggcttgggggcctggaaactgagagttggtgtttactgaatataaagcttcaattggaaagataaaatactttggggatggtgatggcgatggttgcatagcaatgtcaaaccacttcacaatactgcactgtagagttagaaagagtaaatatggtaaattttatttcatttgtttttttttttactataatttaaaatgagaaagagtagtaaaaacacacaaaagagaggagctaacagataaaaagtgcactaagttagccaagccagagctttaagaaccattatcacttctctctctctttcaccccacaatcaacattaatcaggtccaaccatgtgttctgccttcttagcactgctcacgtgtgtcccctcctctcttatttccatgcactctggcccagctgggcttcttctctctttgcctgtgatttgctctgttgtcctccctggctcagacgtgcagtcccagtctctcctgatgctttgtccccacattgagggcactgctgtttccccacaggccactcctttttttttttttttcttgagacagagtcttactctgtcacctaggctggagtgcaatggcacgatctcggctcactgcaacctccacctcccaggttcaagtgattctcctgcctcagcctcctgagtagctgggattacaggtatacaccaccacacccagataattttttgtattttttttagagacagggtttcactgtgttggccaggctggtctcgaactcctaacctcgtaatcctcccacctcagcctcccaaagtgctgaactcctaatacaccctctgtcctttcccaccttgtctgtgccctggaggctgactctatggattgcatcatcagtgtctccttgcctttagcgtctgattgagttcaaccatggaggcactgtcaggagagcagagggtgagaggagagagaggccggggaatcaattcccacacatatgccctgccaggctgtggtttgtcagcaactgtgctcctctacccatgacatcagctcccgcaaggcacctcccatctcccacacagggctctctccaccccttgacctcccatcctgggagtggcagtggcttcctggggtgcttcatccctctcatttgcccacacctttatacacttctttttcttttttcttttctttttttttttttttttttgacggagtctcactctgtcaccaggctggagggcagtggcaccatctcagctcactgcaagctctgcctcccaggttcacgccattctcctgcctcagcctccaaagtagctgggattacaggcgcccggctaattttttgtatttttagtagagacagggtttcacc[140 bp omitted]gggtacatgtgtaggtttgttaccaaggaatattgtgtggcattgaggtttggagtaagactgagcccctcacccaggtagggagcatggtacccaacaggtagtttttcagccccatccccctcctctccaccctcagtggtccccagcgtctactgttgccatctttatgggaagatgtgtacctaatatttagctcccacttataagtgagaatatgtggtatttggtgttcagtttctacattagtttacgtaagataatggcctccagctgcatccatgttgctgcaaaggacatgagttcattcttttttatggctgtgtagtcttccatggtgtatatggaccacattttctttatttggttcactgttgatgggcaacgaggttgattccatgtcttttctattgtcaatagtgctgcaatgatcatccaagtgtgtgtgttcttgactagaatgatttattttccctggatatatacccagtaataggactcctgggtcaaatggtagttccattcctagttatttgagatatcctcaaactgctctccacggcgactgttagtcctagctctttgagaagccaaggtgggaggattgcttgaggccaggagtttggggccattcgattctctaactactacccctgctgtatagaaatgtcattgatatggatttgtttttattttcttataaatcctaatggactttgaattttctatttagagaatcttactacctacaagtaatgaaaaaatctctctagccctcatatatcttatttttagttttttacttttactgatattattacatcagttaggacacctcagtagaaaatggaataaaagtggaaagaccattaagcctcgttttgttcatattttagtggaaattgatctaagcttcatcattaaatataatatttgctattgatttgttgctgggcatcctttaacatgtttatgatgtttcattctattcctaattcattaagattttttaaaccataaataagtgcagattatagtaatattgagcaaatattttcttctcacctccaatgggccaccctctagaccccctaccctcaccctcatctcccctacctcaccgcgggtctctgtcctcagacccctgctgcaggggacccctggaggtgacatatgctcagctggaccaccaggccttcacttggaggacagcccaggctgtgtccccagagtccatggtgcccatggctgagtctagcatgtacacagccctcgccaggcactgactccgggaccactgccccctgcgcctgaggaagtcatgcttggaaaagcctcaagaagccatctggagggcttccccttggaatcatcctggtctgcaaaaccagtcaactgttctggagataagaggtagagcccaaagttctctagtcagcatctagaaagttcattaaccaggtgattccttccacaactgaccagcacctcaaagaggtggcattgcagctacttctagaaacccagctgcaatcacctggctgtttccagacacctagttccagtcacctggttgtttccagtgatccagctgctgtcacttctctgtttcaagacacccagctccagtctcctggctgtttgctgagtctcagctatagccatcccagctgattccattaacaatgttgcatccccctgcagtttccaaatgtcttctgtaaatccccccagctgccccagcaatcgtctactcagctgatcctgaacattctcctagagtttagttgttgaccttgagaatgagctatacatatggatctgagagctgagaccagtcctctgggtcatgctttacttcatgcaccaatgaatagtttaaagacctcacatctggcagtcctgtgtcatgttctggggtgtatagatcacttggacccaatctctgccttcatgttgttcaaggttacatggggttaacaagagctacaaaggaggtgtcagtatttttttaaggatttcattggcagtgattgcatatattcaagatgcacaaggtgataatttgatatacatatacattgtgaaataatagccacggtcaaatgaatcagcgcatccatcaccagctacgctgtacataagatcccctgaacttgctcatcttaggcctccaagatggagcatatgatcagggatcaattaaggtgtctgagcggatgcatggatgggtgaagacagagagctaatcccacttatgcacttacacacatatgcacatgtactcacacattcacacatgcacacacatgcacaaacctgaacgcactcacacatgtcaggagacctctgaatcctctgtgcgctgggacttggttgtctccacccctcttagaaagttagatgctctccctattcagattaaaacggaaaattacttgagaaccactagggggagacagtacctcatttgaattaatttttgtgcacatttaaaataaacaataacacacttaccatgggcatgcctttggccggattgcaaaggtaaacatatatcaaagcatctcatggtacccaataaatatatacaattattatttttcaattaaaatatcgtaataaaataacagaaaagaaacctgcatacttgtaacagagtggatttttaaatgtcgttttatacaagaaaaagaatattttttaaaaaactcaacaataactcaatcagcttatcctatggagcaattactagttgaatactatgcaaacatcaacacattcactagtcttacatatgccccacagcttgtcctattttttccccacttgtggggattttgatagttgttgagtatgtctaatccaattatacattccagagcaaggaataaagccacaggatgcatttggtggccaagaaaattcaacaggagacaaatctgagctaaaggttcattgactacctgacctccataagcttctaatctgactggagggtcaccatgatgttttgggtcttctgaagttagtgttagctcagagccagtgtctagttgcacccaaaatatctgatcatttcctttacccagtacacagctaccatgataaaggccataggtccatttaagggaagctgagataaatataattgtttaactttttatagtatataccggggcagcgccttcaaggatacctggtcttccctttaattcaaggggttctgggtctataaactggtgaaattctagtaattgattaagagactgtaactgtctattttatgattttaattagattcttgttctctttgccaagaaatgttctgcttatacaaatcaagtaagaatgaagtaagtttcctatctatttcacgtcttagaacgctgcggtcaactagacaacactaaagggctgcatgagacagtctattctgattactgccttgattctgctttccattatgatcaccacacccagttctatgataaccacacccaattcaacacaccagattctcacctttgtcgactgacttctgacacttgagtcctgccactctaggatccaactactccccttacatttaggtttctcggttcagtggcagcagttcccactggaagttctggcctctcctaatacaccctctgtcctttcccaccttgtctctgccctggaggctgactctatggattgcatcaccaacatcttcttgtgtctagtgtctggttgagttcagccatgggaggcactgtcaggagagcagagggtgagaggagagagaggccggggaatctattcccacacgtacgccctgccaggcaataaactgtgctcctctacccatgacataagctcccacgaggcacctcccatctcccagctcagtcctcaaggtgactttccagagacctagttacattcggctgttactaaagagtcagctacagtcatctagctgtttccagtgaccacccccaatcccccatagctgcctgcctgtttgcagagacccagctacatgcacctagctgtttctagagacccggctacatccacctggctgtttccagagacccggctacatccacctggctgtttccagagacccggctacatccacctgactgtttccagagacccggctacatccgctggctgtttctagagacccggctacatccacccagctgatttcattatcactgacgcagtccccagctgctcctatgtctcctggaaatccccaattgccccagagactttgttgtaattttctgttcagctgactctagggatcttcctggagcttaattgctggccttaagaatgggccatatttatgcaactgagagcagagcccagttctctgggccatgctttcctttgtacatcaacaaataatcctaaagacctaaagtctggcaatcccacgccaggtcctagggtgcacaggtcacctgcatccagtctttgccttcacagttattcaaagctgagcagggaaaaaggagagccacagagaagttcagtgttttcctttttatctttttaaaaaatccttttttatccttaaaatgatttaatcaaccaagattgtatatattgaggtgtacaacatgatgatttgatatacgtatacattgtgtaatgattgccacaatcaaattagcacactcaggacaaccagtgccctaaatagatcccctggatttgtacacgttatgccttaaagttggtgccagagttccatttatttatttttatccatatataatagttgtatataggtttggggtacttatgatattttgatacttgtatgcaatgggtaataataaaatcagggtaattagaatatccatcacctcaaatatttatcttttctttttgttggggagcattacaattcttttattctagttgttttgaaatacacaatatattattgttaactatacttcccctactgtactgtcaaatactcagttatttctcctatccagctgtatttctatactccgtaactaacatctccttatctcccaccctttccagctctagtaaccaccagtctacacattttttttttttgagacagagtcttgctgtgtcacccaggatggaatgcagtggcgtgatcttggctcactgcaacctttgcctcctgggttcaagagattcgcctgcctcagcctcctgagtagctgggattacagatgcatgccaccacgccaggctaaagacagggtttcaccatgttggccaggatggtctcgaactcttgacctcaagtgatccacccgcctcagcctcccaaagtgctgggattacaggcatgagccaccacgcccggccttttttttttcttttgagacaaggtattgctctgttgcccaagctggaatgcagtgacacaatcatggctcactgcagcctcaaccctccagggctcaagcgatcctcctgcctcagactcccgagtagctaggaccacagtgcacaccaccacgcccaactaatttttgtatgtttcgtagagaaggggttttgccacattggccaggctggtctggaactcctgacctcaagtgaaccacctgccttggcctcccaaatcactgggattacaggcacaagccaccacacctggccaaccagtctactctctctgtttaggaatccacttctttagctcccacgtatgagtgagaacattcgagatttgtctttctgttcctggcttatttcactgaccataatgacctccagttccaactatgttgctgtaaatgtcaggatttcattcttttttatggatgacccctcttccattgtgtatacataccacattttctttacccttttatccactgatggacacttaggttgattccgtatgctgacttgtgaagagtgctgcaataaacacacgggtgcagggactcttgtgatgtcctgagatttttttcctttgcatgaatattcagtagtgaactcactggattttacgataattgcagtttcagtatcttgaggaatctccgtgttttttttttttttctttttttgagacagagtctcactgtcgcccaggctggagtgcagtggcgtgatctcggctcactgtaggctctgcccctcggggttcacaccattctcctgcctcagcctcccgagtagctgggactacaggtgcctgccacctcgcctggctaattttttgtatttttagtagagacagg[135 bp omitted]actaatttatattcccaccaacagtgtctaagagttattttgtcagcacatcctcaccagcatgtttttattttattttattgatctatttatttatttgtttgtttgtttagatggagtctcactctgtcgcccaggctggagtgcagtggtgccatctcagctcactgcaacctccagctcctgggtgcaagcgattctcttccctcagcctcccgagtagcaggagcctcctgattacaggcgggcgccaccacgcccggctaatttttgtctttttagtagagacggggtttcaacatgttggccaggctggtctcaaactcctgacctcgtgatccgcctgcctcggcctcccaaagtgctgagattacaggcgtgaaccactgtgcccagcccagcatgtttttatatgtttctttgataatagacattttaactgaaataagatgatactcattgtagtttcgatttgatgccagtgatgattgtgggtttttgtttgtttgtttgtgttttgagatgaagtctcgctctgtcacccagattggagtgcagtagtgtgatcttggctcactgcaacctctgcctactgggttcaagtgagcctcctgcctcagcctcctcagtagatgggactacaggtgtatgccaccacgcccagctgtttttttttctttttttgtatttttggtagagatgaggtttcaccatgttgcccaggctggtctcaaactcctgggttcaagtgatccacctgctttggcctcccaaagtgctgggattacaggtgtgagccaccgcgcttggccgatgattagtgttttatatagctgttggccatctgtacattttcttttgagaagcaactattcagatgctttgcatacttgttaatggaattatctggggattttttgttgaggtgtgtttcttctaggcctaatttgttgatagttttaatgatgaagggatgttgaattttgtcaaatgtttttttaacatctattgtgatgatcatataatttttttttttttttttagacagagggtctctccttcacccaggcaggagtgcagtggcgcgatcttggctcactgcaacttccacctcctgggttcaagagattctcctgtctcagcctcccgagtagctggactaccggtgcacaccaccacacccagttaatattttgcatttttgagagagatggggtttcatcatgttggccaggctgatctcgatctcctgacctcaagtgatccacccatctcaatctcccaaagtgctgggattgcaggcatgaaccaccgcgcctgcccatgattatatgttttttgttcttccttctgttgacatgagatatcatatctattgatttgagaatgttgaaatatcctcccttctggctgctgtgtggactgcgagctctcctaccctccatggtcttccaatcccactgtccccaggccaactgctcccagactatgcagtagtctcatgtgcatggagcagttgcaattgatcctggtggtgacagaggggttggtgtttcaggcatggcacagtcagaggaggtcccaaggagagaccaagaggtaaacttaagtagagctgcaccccttccttggcatctgtagaaccctggataaaatcaaatacgccaacccaaatgcccatcaatgatagactggataaagaaaatgtggcacatatacaccatggaatactatgcagccacaaaaaaggatgagttcatgtcctttgcagggacacagatgaagctgaaaaccatcattctctgcaaactaacacgagaacagaaaaccaaacatcacgtgtcctcactcataggtgggagttgagcaatgagaacacatggacacgaagaggggaaaatcacacaccggcacctgtcacgggctggggggctgggggagggatagcattagaagaaatacctaatatagacaacaggttgatgggtgcagcaaaataccatggcacgtgtatacctatgtaacaaacctgcacgttctgcacatgtatcccagaacttgaagtataataataaaaaaaaagaaaacgaaacaatgaaacatgggttcttatgaatcacagaacacccgtgaccccaagttaagatggaaatttatgattcattccaactaggtcctgttttcagtatctcacaaaagcttgactctagagtgaaatatacttggaaatgaatgaacgactcttgtggtctttttacttcttgtaaggctttaggatccacccgtttgaatacctatgaccaggacctcctgcaatgcttctctctccacctccaggcatcccttcattcagataataccaattcatcatcaccatctgacctctccttcagcttcttcaccaccctccatctcaattgctttctgtttttcttctttattttttgaacttcaacttttattttagatacgaggatacatgctcaggtttgctacatggaactattgcacccaggtggtgagtgcaggacccagtgggtatttcttttatcctgtcctattgcgttaaatctttccttcccgggactggtcctatctctaaactttttgcgtagtgattttatcaacttaatttttgctaggatgctagattttctaggaggggaggtaatttgaaatgaagtctgggttactgtgaatccagtatatctgctttgctcgcctttatctcttgtgtcctgggatggccacaggttgacatgtttaaatgtttcttaagtgaggatggataa[140 bp omitted]atggtgaaaccccatctctactaaaaatacaaaagttagccgggtgtggtggcagctgcctgtaatctcagctctcagctactcgggaggctgagttaggagaattgtttgaacccaggaggccgaggttgcagtaagccaagattgcaccactgcactccagcctggatgacagagtgtcaccctgtcacaaaaaaaaaaaaaaaaaagaagcaaaatacaagaagtccaggactggtaaaggcaaggcatgttgagcggttagaaaaggggtgatgacatcgaaaaacctcctggcatttcccagtccttgcctagcacaggttactctgaaagcaggacttaagacaaggatatgagcgcaggtaactgatttgggaaccaagtttaagggaatagggttcccttatgaaagagagaaggagaggaattcctgaaatcagcatgcattgcggacaccactacagcaggtaatatggacaggtccacaccaggatctctgataatgtgcagaccatcatccagaacttcccgccaaaacaggagatactcgccaatatgtgtatggctttctagcccccatttctgggagtttctttttccccagccactgtcagacgcatcaagctttggctgaaatagcttccaataaggtccttacacacaaatgtggagagacacatggaaatcctcgaaatgagatactgtcccgtgattctgagagtgacccaaaaggatacggaatgaggtactaaaagcaggtgcttggaaacctgagggcagtggtgttcatgcgtttcccggcactttgactttcagcctcctgcaagcctctccttctttgccttcctgaccgttagatacaattaatttggggtttgttttttctgcttcctctttcccctcccaccctatgtttcagttctaaagttagaaggtcctctcatccttttaagaagaacagagacagaaaatggttagtcaccatctaggacagactacaattccagatcattgcaggacgtgcccactcaaatggatgattattgagagctggccacctgaagtgttttacacaggcagtgatctaagggttgaagctatctggcctttttgcttgcttgttatgtatttatggcttttttccttttcaaaataattttactaaatatttaattcaccaactatatatatttatggggtacaatgtgttataaatgtatacactgtggaatgatggaatcaagacagttaacatgtccatcactccgcatactaacatctgtgaaaacatttaaaatctatgcttggctgggcgtggtggctcatgcctgtaaccccagcaactttgagaggctgagatgggcggatcaccagaggtcaggagttcgagaccggcctggccaacatggtgaaaccccatctctattaaaaatacaaaaattagctgtgagtggtggcgggtgcctgtaatcccagctacacaggaggctaaagcaggagagtctcctgaacccaggaggcggaggttgcagtgagctgagatcacaccacagcactctagcctgggcgacagagtgagactgcatctcagaaaagaaaaaatatatatatatattttggagctacatcgtgctagcgctgcagagaatgagttttgttttgcgacacagtttttagatgtctaccgggctctggtggagatggaatgtttggcctcaagtgggcaggtcccatgggacatgagtagccgaccatgacctggctgcgtactggcccaccaagcattcgactggcgtgcccagccactctccgtcatcgcagagaagtgctctatgtgagatttggttaaaggagtccctgaaggcctgtgggaggcagaatagtgacctcccagagatgtccacctcctgaggcccagaccctgtgagttggggaagcttatgtggcaaaagggactttgcagatgtgattaagtcaaggatcttgggttggggagattacccaggtgggcctgatgtaatcacaaggggctgagtaagtgaaagaggaagacaggagggtcagagtgagagaaggaggtgagtgcatggaagcagggggcagataacgggactggtggctttgaggttggagggaatggagaggcaggaatgcgggagcctgcagaggcttgaacaggcgagggaacagattctccttggagcctccaggaggacacggctctgatagcagcttcattttagcccagggagacccattttggacttgtgacctccgggacggtaagtcaataaacctacattatgtgaagccactaagcttgtggtgatttgttatggcagcaaaaggaagctttatggttcatctgtaccctgaaaatgcaggtttttggttttttttttttttcacttgttcaatgatgtacccccagtgtcaggcgctttgcaaacacacgatacatacgggttgatgtttggtcaagagaggaattaagaccaggcagacagcaggctgggatcagagagaccccatttctgtctgaaatgtctgcagagaacctggtgcctgcctcagccctagctctggggaaatgaaagccaggctggggttcaaatgagggcagtttcccttcctgtgggctgctgatggaacaaccccatgacgagaaggacccagcctccaagcggccacaccctgtgtgtctctttgtcctgccggcactgaggactcatccatctgcacagctggggcccctgggaggagacgccatgatccccaccttcacggctctgctctgcctcggtgagatttaaagagggggaggggagacccgagtcttggaggaaatttgcctcac[187 bp omitted]gttgcaggcgcctgtggtcccagccactcgggaggctgaggcaggagaatggcgtgaacccgggaggcggagcttgcagtgagccaagatcgcaccaccgcactccagcctgggtgacagcgagactccgtctcaaaaaaaaaaaaaaaaaaaaatctcagggtaaagagaggacctgctcaggcttccggggcaaatccctcacagggaactctcttccagggctgagtctgggccccaggacccacatgcaggcaggtgagtctgtccccagctgtcccaggtccctcctcctcactgggacaaggggccacccatgggcagctgggggaggagacagcagttctgggtgactgatgaggatgacgggggggtcctggggctgagagctgggatctgagggctgaggaaggtcttgggatccagcctctgattttcttccagggcccctccccaaacccaccctctgggctgagccaggctctgtgatcagctgggggaactctgtgaccatctggtgtcaggggaccctggaggctcgggagtaccgtctggataaagaggaaagcccagcaccctgggacagacagaacccactggagcccaagaacaaggccagattctccatcccatccatgacagaggactatgcagggagataccgctgttactatcgcagccctgtaggctggtcacagcccagtgaccccctggagctggtgatgacaggtgagaggacactcaggggtcccagccccaggctctgccctcaggaagggggtcagctctcaggggcatctccctctcacagcccagccctggggatgatgtgggaggtgggagccccatttaacacggtgcctccttctctcctaggagcctacagtaaacccaccctttcagccctgccgagtcctcttgtgacctcaggaaagagcgtgaccctgctgtgtcagtcacggagcccaatggacacttttcttctgatcaaggagcgggcagcccatcccctactgcatctgagatcagagcacggagctcagcagcaccaggctgaattccccatgagtcctgtgacctcagtgcacggggggacctacaggtgcttcagctcacacggcttctcccactacctgctgtcacaccccagtgaccccctggagctcatagtctcaggtgaggctcctgaccctgtcctctctgagctcagtggctccgttcatgccctgctgccaggagagctctgggcagggatggagggagaggggctcagccagtgggggactcagccctcagaggggaggaggacaacaggggccctcccaggcatgcccatgctcttctccctcacctagggtccagaaggtgccaggtggacagagaaatggtccttgggaagctgcagggcagatatagggagaggttcaatttgatgtggagacccaagggcaaccccagactctcaccctcctcttgtccttctacccaggatccttggagggtcccaggccctcacccacaaggtccgtctcaacagctggtgagtctcagaggcctctgtccagagagtttccaaagcccgaggcctgtctcaagacatgctcagtggatctaagtcctcgttccaattctcagctgggcttgcttccacgggtgtgggagtcgggcagcgacttgggaggcaccacaggctcccaaggccctgaggctgggctggtgaggggtgagggggtcaaggctgaaggagatgttgcggggagaagccgagctgatgtggggagcagggcagccccagccctcacatccctgttctaacccagcaggccctgaggaccagcccctcatgcctacagggtcagtcccccacagtggtgagtgaggggctctgagtgggaggtgggcagggtctaggggagccaagggtgggttctgtcctaggttaaggctcctctggaggtggtgatgtggacaggcccctcccctgcatgggcctcagtttctccaagtgtaaaggagagaggcctgcgggtgggaaagttcctttcagctctgactcccagctgtgccctcctgggagaggaggcctcccagggaacctcccagacccgattccgcaggggcctgtccggtcccacctgcagcagagacggtgacctggggcaggggaggggagcagggcggtggttcaagacagtcaggctctttccctgcaactctggggcttggctctggtgcaggaacaagggctgcagctcagactcccgggtttccttcccagctctgccgcttcctggctggaggggtctggggcaggcgattcccctctctgagcctcagtttgtgcatctgtgaaatgggtggagagagggtggcaatctcaggttgcacaactgctgtgagggttggaggtaatgaaagaaagacccagcacacacagtaggtgcacacacagtaggtgtgcacatcaatgacatcatccccattcctgatgtcatcacgcccaaggtctgagaaggcactgggaggtactgatcggggtcttggtggtctccatcctgcttctctccctcctcctcttcctcctcctccaacactggcgtcagggaaaacacaggacattgggtaagtaggaaattgggggacccgtgggctgatggagggtgggctcagggcaccagccaaagggactccagataggagaggtcatcttagaaactctgctccagaaattcccagtgagaaaatctagaaagaagaaaatgaatgagggagtaatggaagtgctttattctttcggtttttctaaacttagaaagtatttaaaacatccttgcaagtgtattttcaggtttcctttcctcttgacttgcatgtgcaaggcaggtggttctaacgttcccagagctgagactctgtccatcttcccccagcccagagacaggctgatttccaacgtcctccaggggctgccgagccagagcccaaggacgggggcctacagaggaggtaattctgcccaaagacctcagactcccacccatcccaacagccacctcactgtccccttacactcccgtatcctcccccaggtccagcccagctgctgacgtccagggagaaaacttctgtgagtgagaggcagagaaggtgcacctggggtggagctgggggtcccaaaatttcaatagcaatgggggcaggagcacaggctaggattggtcagggactcagggagaagtggtctgaacccacattgtgggacctcggggacatcacagcccctccctgcgttgcagtggcactaatgggaacagggcagggaccagcaggaatgagaggtcccagggaaccttcccaggagatgaaccccttgctctaccccagcaggtgctgccgtgaagaacacacagcctgaggacggggtggaaatggacactcgggtgagaacccgcccctgtccccggcaccaaaggcctcctggtgccagatctaatcctgcaggacttctctgtcctccttcccccggctctcagcatcgtcacggtggacccctccttgtccagcacgctgcctcctgcctgctgggacctcactctctcctgctgtcctgggacctcatgggcctcctcccgggtccccttcctgctcctcatcctctgtttggccatctggttgttagagagctccccaggcctcaggaggatgacgaataaatgaaccactccagtcccctgggctccccttcattcattcatctagtgagtgttcccagggagctcactgtggatggggctccccatgggagctgcagacacagcagggagcaaagccgcccccgcctcctgagctcacctcgtggtgggagacaaaatgcaaataaatgcatcgtgtccaggagtgcaacgtgctgtaaggaacataaaccaggtaaagggcagagagtgtggggcagtggggccagtctgaatggaaagggagggctgtctgctcagctgtcatctgagaagcctggacggagagggccacgtgatcctctaatggacgagcccctgcaggcagaggaaacagccgtgcaaaggccccgaggcagcagcgagctcttgcaggaaggccgcgtgaggctgcagccaaatgggcaaggtcagagtgaggagcagagaccagaaccacagggagggagcggccagaccctccacggccttagggcatccctgagattccgtcaggaaagggatgtaatcggatcaccctgggaacagtggggaaaattgactccagggagtcaggaggattcaaggacaccccccaccactgtctctctccagcagagcccacacgatgaagacccccaggcagtgacgtatgccaaggtgaaacactccagacctaggagagaaatggcctctcctccctccccactgtctggggaattcctggacacaaaggacagacaggcagaagaggacagacagatggacactgaggtgagtcctttcctctccaggcccccaggcctcccccacccccaccacgttccttccctctcactctcccccgctgcaggctgctgcatctgaagccccccaggatgtgacctacgcccggctgcacagctttaccctcagacagaaggcaactgagcctcctccatcccaggaaggggcctctccagctgagcccagtgtctatgccactctggccatccactaatccaggggggacccagaccccacaagccatggagactcaggaccccagaaggcatggaagctgcctccagtagacatcactgaaccccagccagcccagacccctgacacagaccactagaagattccgggaacgttgggagtcacctgattctgcaaagataaataatatccctgcattatcaaaataaagtagcagacctctcaattcacaatgagttaactgataaaacaaaacagaagtcagacaatgttttaaattgaatgatcatgtaaatattacacatcaaaccaatgacatgggaaaatgggagcttctaatgaggacaaacaaaaaatagagaaaaattaataaagtcaaaatgtttattcttgaaaacattaatgatacatgaatcttggccacaatgagaaaaataaaaatgaaaaaagagcaggcatccatttccatacaggaacaaaataggaggcagcactacagaccctacacacagctttacagaggtgaaagaaaactgtcagcaattctatgctgacataacagaaaatgtagatgagatagatgaaatacgaaaaattacagtttacttaatgaacataaggataaatagaaaaactgaatcatcatacataaacatatataaaatgcattgatcctgtaatcaaaaatgttcccacaaagtaaatgccacttcagcaaggtttgttggtggttttttcaaactcttatgcactcatgaaacacacagacacacacacacacaaacttgcataaattttccctgagaatattttgtatatatttacacaaatacatttgatcagactaggaacaagttgataccaaaacctgaaaaggaaactacagaatgggaaagtcatagaagatctctcacagaaatataaatcccttaacaaatattaacaagtaagattcatgtctctataaaatagacagtatatcatgaccacactggttttttgttatcctttgattttgtttatgaaaagcaaggatagcttaattttcaaaaactcaatcaatgtaattcagtattttaacaaaaggaatgaaaaattatcatctcaatagacaaagcttttgtctgagcaccttttcatatagctgctgaccatttgtatgtcttcttttgagaaatgcctgttcagctactttgcccatgtttcaagtagtttttggtttcttgctgttgctttgttttagttccttacatatttttgcatattaaccctttatcaggtatacagcttgcaactattttctcccatttctgagttgtctcttcattctgtttgcagaagctgtttagaagccacaccttttgtctatttttgcttttgttgcttgtgttttcagggccatatccaaaaaaaccttgcccggaccaacgtcttgaagcttttctcccacccatttttgtatatgggataagggttcaatttcattcttcttcatatgaatatccccaggatgtgtcctatgcccagctgcacagcttaccctcaaacagaaaataatgaagccttcttcctcccaggaaaggggacgttcagctgagccgagtgtgtatactgctctggccatccactagcccagggaggacccagacctccacactccatggagactcagttctcctaggaccatttattcaaaaggactgccctctcttgttcttggaaactttgttgaggatcaattcaccataaatatgtgtgtttccttctttgctttcatccctgttgcactgatcactgtacctgtttctattccagttccatgatgtcttcctggctgtagctttgtaggatatttggggattccatagtgtgatatccccttcttccctttgctcaagattgttttggctatttggggtccttttgtagtcccattcaaattttaggattgtttttctatttctgtggaaaacgaccttggaattttgttaggaattgcattgagtctgcaggtatgaacttttttttaaagttccagggcacatgtacaggacctgcagctttgttacataggtaggcttgtgccatggtggtttgctgcacctatcaacccattacctagttattaagcccagcatgcattagctctttttcctgatgctctccctcccttcatcatccgccctcccactacaagccccagtgtgtgttgttcccctccctgtgtccatgtgttctcattgttatacgaacattttaacaatgttaattcttgcagaccatgaacataagctaccttcccatttatatgcgtcttgttcaatttcattcatcaatgttataaagattttagtgcagagatattaaacctccttggttaaatttaattctaagtaattttttagctattataagtgtaatttttctttcgatttctttctggatagtttgtttttagtatatagagatgctaccaatttctgcatgttgattttgtatcctgcaactctactaaattcgtggatcagttctaaaagttgtttggttgagtctttagagatttttatatataaaatcatgtcagcaaacagagacaatatcactttttatctgatttgggtgcttttgtgtatttttattgcctaattgctgtgtctaggacttctattactatgctgaatagaagaagtgagagcatatacttttgagcaaggattcttccatcctcctcctacagaaagggcaggttctaattgcactctggctgaactattagcacttctcatgcacttgtgtgctcagccctcagtcagcctcattggaaagggtccaactgaggaaggcaccagatgtatttgctgctaagtcctggccacagacagtggatgacagatgattatttaaataaagattagctttcctttcaaagttggagtgctaacccacccaatgtccctaaggcttcagggcaggaccatggaaagaggaggaggaaggttctgagaactagacaaggggcactgaggaggcagaaatgaatcaagtgctgtatccagggagatgtggaggagactgttagaaaatagtaacaaaaaaagggaagcccaagcagagaattgtttggtagaaagaatacccacgacccagggtcagtggaggagttatgttttcttcccctatttccctgcatttctgcactatgcacagtgatatcgctgtcactttctcagccctgcaggcttgtcagaacccagtgaccgcctggaactggtggtgacagatgagaggacactcagggatcccagccccaggcactgcattcaggaaggggttcagctctcagggggtgtctcccttctcacagcccagccctggggtatgatgtggaaggtgtgagccccatttaacatggtgcttccttctgtcctaggattctacagcaaatccaccctctcagctcagcccagccctgtcctgacctcaggaggtaaggtgacaccattatgtccttcacggctgggatttgacaggttcattctgaccgtggaaggtgaacacaagctattctgtctcctggaccccgaaaaacagtccgatggacagttccaagccctgatcctggcagaccccatgacttctagccacaggtggaggtttaccagtctggtttagcagactttagcacctgagaccaagagctccagcagctcactagattctgaccatacctggaggcaacctggtgaaagaagaggcttggaaggaaccagccctctgagtcccagctcctcgcacactccaggtgtgcctagggagccctcccatttgactccacagggtcctgtcatggcccatggagagaggttgaccctcctgtgttgctctgatgttggctgcaaaatattctctctgtccaagaaaaagatacatcaccttccccagagttctggccagaagttctcccaagatgacttccccttaggccctgtgagcatctcccatgggggccagtacagatgttcagtggacacaacctctcctctaggtggtcagcccccagtgacccccctggacatcctgatcgcaggtgagaagcccagcgggttcagttagggacccaggctctgtacaggccctgccaggggagcctaggtggtgatggttgggatgaggggtgggggtctcaagggagggagaggcagagagagagagaggatggattgggcggggacggggaaactcagagaaaacagagacagagatactgagggtcccagagagaggcctggggaagtctcagctcagaacaaggtggggcggctcctcacccatccttcttctctccaggacagatccgtgagacagcctccctcttggtgcaaccaggccccactgtggtctcaggagagaacatggccctgctgtgtcagatgcaaagctgggtggacagacactttccttctatctgaggaggatgcagctgacaagaccccaccctcgtatctaatatcaaagtaccctactctgtggtagaggttgaattctccatgagtcctgcgacctcagcccatgcggggacctacaggtgctatgcctcatagagtgtttaccccaagctgttgttcccccagtgacctcctggtaatacaggagttactaagaaattgttttaggcagatagtaagggtaaaggttcttggtggaaattttccagtaataaggaacaatccctgaaccatctcttttctaacagaaatgacagcttaaatggcccggccagcaagctttaatgtgcaaatgccaaccattaaaaactgggttcactcaatatggtgattcctactgtcttctctttgttaccacctgtgccaagtgtgatggccacctccagacaacaccatgtattcaaaacatcatggtgacccaaatgaatgaaaaagccctttttaatatgcatttttaaaggcctacagaaaaccagggccaaacctctcaattactctaaactgtctataatggaacaaaagccaaataaaaatcttgtagcctttataaaaaggctaaaagaggcactaaaaaagtatatctttttattctctaatccagttaagtaacagctcatcctgagggacaaatttattacacaggcagctcccaatattaaaaaaaaaaaaaaaaaaactacaaaagaaagctacaggaccaaatagcaccttaaaaaacctcctgaaggtggccactttggtcttttataatatggaccaggaggagtcccaaaagaaagaaaaaaagctcaggagaaggacaaagtctctagcagcagctttgaaggctcgcaaagtcccagatcaccaagatgcatcctctagttgctattagtgtagcaggccagaatgtccagtcagcaaaatgaagcaacctccactctgtccagcctgtggcaaaaaccactgaaaacagaactgcccccagacatggaggtcactgagttcaaaaccagtctcacagatggtccagcaaaactgatggatcctggtgcttgaacctaggctccagtagctcaaactgccattatagcacaagagccctggataattctggaaattaaaggaaggaaagtagacctccttctaaacactaaagctagtctctctctcttttctattctctaatccaggcctcccttcttccttcatcacaaccgtaaggggcatcttaggaaaaagtctaatccaatattttctcaatcttagttaaaacatgctttcggtcaggcacggtggctcacgcctgtagtcccagcactttgggagactgacgtgggtggatcacctgaggttgggagttcaagaccagtctggccaacatggagaaacctcatctctactaaaaatacaaaaaattagccaggtgtggtggcacatgcctgtaatccaagctacttgggaggctgaggcaggagaattgcatgaacccaagaggcagaggttgcagtgagccgagatcgctctattgcactccagcctgggcaacaagagtgaaactccatctaaaacaaacaaacaaacaaacaaaaaatcaaaaaaacatgctttcaagccattgaagccattgtcatgatagctctactagtcagaaaagcctgcaagttaaccctagaaaataaaaataatttaactgtttacagcccacataatgtagcagaatcactgtcctctagggggagctcttagctggtaaacagcccgtaaagcaaaaagtaaataaggcagaataagcagtagtcactctctccaggcacaaacactcaattagctgagttaatagctctttaaaaagcacttaaattaagcaaggaaaaggcagctaacatttacactaactccaagtatgctttcttggttctccatgctcatgctgccatttaaaacaaaaaaacatgttcttactgctaataaatctcctataaaaaatcaccaaaaaattagcaagttattcttattttttcttccacaaaaagtagcagggatgcattgtaagaaacatcaaagaataaacaataaggtagccaaaggaaataagttagccaatcgggcagctaagtcaaaggcataaaagcttcaaggccttaatgcacttcaagccccttctaatctaaaaaggctccataagagaaatcacacctcagtattcccctgaaaaaatagaataagccacttctcaagggcatacttttcagccctcaggatggctacagtcaggatggcaaatttattggtcagcctccagccaacagaaagttcttgaagtcctaagcttttcactcaggaaaaaataaaacttatcaatgggctcaaacattgttttcagacgggaaacctctagaatggttaaccacgtaacctctctagctcacttccaacaaaaattgacacaatagcagaagcccagccctaggaaataaaaccacctttatttaactcaggaaatttagtattagtaagaactctcatctctgtctccttccctaagccaagctaaaaagggccctacactgttcgtctttcaacctcctcggcagtaaaagttacaggaatcaacttctacatgcatcacactcaagtcaaagccaaaaagctaaaaaaccaacccctaacagtaaaaaaaaaaaaagctaaatattaatgtaaaaaaatagaagatcttaagctaaaaatcatagaagataagtaactaagtaagggctacacatcttactcagtcccactcctacccaccaaatatgttttattatttctaaccttttctcacaaagttcacggccaaatattaaaacttctttttaacacttatttgcagcaaaatttaaatattcataaaatc[139 bp omitted]ctcccgagttcacaccattctcctgcctcagcctcccgagtagctgggactacaggcgcccgcca[146 bp omitted]gcaagtaaagttttaaacaaaaattactggccagaaaaaaaaaaaaagccattcttgtgaaaattgttgtagtcacactgctatttgcaatgaaactatactctgtggcacccacaatgtagaattctggttgtaaaattgtaattgtggtaatattttgcctgattatcatccttataacaaaattaataattgcagaaaaaatttaatcaaggttgttttgcttatagcagaagtaatagtaacgaataaaaagcaagcattaaagttttactagcattaagtgtaataaaactttttaccaaaggttggtgatataatgcactgtaagctataaaaaggttataaaaacatttacataaaaaaggattttgtatggtgaatacttgtcctaaaagaaaataactggttgtttaaaggaagaatgtttaggacaagtctaaaagtttaagtgtgttgtaagagagtctgtgaaagtcataaaaaatttaataattaaaaaaagtcaaaattaacgctaaagttattttagccacccaataatgtatttctcccaatcatactgcaagtagtaaaaatggcctaagcctaaagttattctctactggcacgttaaggaggaaacatatgcttttctctaggaaaaagttacttttacagtaacgttcctggtaatgtacaccgacatctagtggaggaaaacctgtattgcaatccattgatacaacaacaggtgtcaaactccactgtcacttagggtctgtaggactgccactaacgatggtattttttttttttttgaaacagagtcttgctctgttgcccaggctggaatgcagtggcacaacctcagctcactgcaacctccgcctcccgggttcaagtgattctcctgcctcaacctcccaagttgctgggattacaggaactcaccatcatgcccggctaatttttgtatttttagtagagatgaggtttcaccatgctggccaggctggtcttgaattcctgtcctcaggtgatctgcccgcgttggcctcccaaagtgctgggattacagacatgaaccaccacacccagccccaatggtggtaatcttaatactcatattctaaccctatattttaaaccttcttgtaaaatttctctctttttgcctaaaagtaattaaactccaaatggtgctgcaagcaaagccacacatggacacgccattcttttgagaaaccttaaatcaacctcagaaaaaggcccaactgctgttcccccacacaacaccccttttcagcaggaagtagccagaaagaaacatgatccaacacgcactaacagcagttagctttgcctctctttaaggggaggaataatacaggagttattaaggaattattttaggcacatagtaagggtaaaggttcttggtggaaattttcctgtaataagaaacaacccctgaaccatctcttttctaacagagaagctgtcttaaagagcctggccggcaagctttaaaattcaaatgctggccattaaaacatgggttcatgcaatatggtgatttctgccatcttcttatcaccacctgtgccaagcgtgatggccacctccaaataacacaaagcatcatggtggcccacatttgcatattaaaaggctaaggtgggaggaacaagtttttcgagggctatgtaaatgacacacctggcctaaccaatcccctgggccctatgcaaaccagacacttgcctcctccagcctcccaatataagcaaccacttttccaccacacacggggttcttctttgttccaagctcccctcccttggctctgtacagaggagctcttttcttctttctttcttctttcttgcctattaaactttttgctccttaaaaccactccacgtgtgtccttattgttttatctaaactggcatgagaccaaaaaccctagtcaccaaagccatatcactggagctcatggtctcaggtaagaaacctccaacccgtgtccattgaagctggcattagtcgtgtgaatgtagaacttcatgttagtaacacagcttttaaaatgtttccctaaattgaggcggagcttgcagtgagccaagattgtgccattgcactccagcctgggcgacaaagagagactccgtctcaaaaaaaaaaaaaaaaagtttccctaaattgtatatttttactgtatacaacatgtggtattgcaacattcctatttgtgggttggctaaatcgatctaataaacatacacatcagttcacatacttactactgtttgtggtgagaactcttaaatctactctcacagtgattttcaagaatagaatatatcgttattaactatagtcaccatgttgtagcatagatctggaagttattctgtcaaactggaattttggacccctctatcaacatcctcccaagatataggaataaatgtgagcacatcaaaagacacccaaaccattacttattataaaaattcataggaatccacagtgagacactacttcaaacactggattggccatattctgaaaaataacaaatgtcaggaagggtgtgcggaaagagaaccttcacgcactgctggcatgattgtgaaatttttcggtgactgtgaaaagtggtttggaggccgggcgtggtggttcacgtttgtaatcccagcactttgggaggccgaggcaggaggatcacctcaggtcaggagtttgagaccggcctggccaaaatggcaaaaccccttctctactgaaagtgcaaaaattatctgggcacggtgcaggtgcctgtaatcccagctactcaggaggctgaggcagaatagcttgaacccaggagcagaggttgcagtgagccgagatcgtgccgctgcactccagcctgggtgacagagccagactccatcaaaaagaaagaaagaaagagagagagagagagagagagagagggagggagggagggagggacggagggggagagagagagaggaaagaaaagaaagaaagaaagaaaaagagagaaagaagaaaaagaaaaaagcggtttgacagttccttaaaagatgaacctaggaaggcttatatgctgttggtggtaaattagctcaacttctatggaaaacagcatagaggtttctcaaagaactaaatacagaactgccgtttgacccagcaatcccactactgtaaaagaaataattatattaaaaaagacacacgcactcgtatgttcaccgtggtgctattcacaatagcaaagtcatggaaccatcctagatgtccatccatcgtggcatggataaagtaaaagtggtaaatatatagcccagaatacagcatagccataaaaaatagtgaaatcatgtcctttgcaggaacatggatggagctggaggccatgatcctacgtgaactaactcagaatcagaataccaaacactgcatgatctcacttacaagtgggagctacacaataggcactcatggacataaagatggagataaacacagggaaacccaaaag[142 bp omitted]atgtgcagaaaccccatctctactaaaaatacaaaattagctgggcatggtggtgcatgcctgtaattccagctactcgggaggctgaggcaggagaattgcttaaacctggaaggtggaggttgcggtgagccgagatcgcaccactgcactccagcctgagcaacaagagtgaaactccatctcaaaaaaaaaaaaatctatctatctatttatatatatatatacacacacacacatacatacaccaaacaagcacatgtaccttttgaatataaaataaaataaaataataatataaaataaaataaaaaataaacctagaattactctatgatctagaaatttcacttctaggtatgtgactaaaggtttaggttatacaagacgaatgaagtttgcaatgtaccctacaacattttgtctttagttaacaatactgcatcatgaagttaaaaattggtaggagaattaactcttcctaccacaataaaaaaaaagactgatagtagatattgtgaaaggaaattaaattttgggaccccacactcatttagctaagggggaaagtcaagctggggactgggtcacacaaacctgcctctccattttggttcgtgaataagatggctacaaggtgaaaagctacatgcctcccccacgttttgcccacaagaagattcctagtgagctgttaaaatttcaccatggcaatgtaaattgatagcttatctttccaatgtatattgatagcttatctttccagtgtatactgatagcttatctttccagtgtatattgatatcttatctttccagtgtatgatagcttatctttccaatgtatactgatagcttatctttccagtgtatactgatagcttatctttccagtgcatactgatagcttatctttccagtgtatactgatagcttatctttccagtgtatgttgatagcttatctttccagtgtatattgatagcttatctttccagtgtatattgatagcttatctttccagtgtatattgatagcttatcttttccaatgtatattgatagcttatctttccagtgtatattgatagcttatctttccagtgtatactgatagcttatctttccagtgcatactgatagcttatctttccagtgtatactgatagcttatctttccagtgtatgttgatagcttatctttccagtgtatattgatagcttatctttccagtgtatattgatagcttatctttccagtgtatattgatagcttatctttccaatgtatattgatagcttatctttccagtgtatattgatagcttatctttccagtgtatattgatagcttatctttccaatgcatattgatagcttatctttccagtgtatattgatagcttatctttccagtgtatattgataacttatctttccaggtacagtctccccagcccatcagacacaaatgcatatctgatcattcccccacccaattttgtctatgtttatcttatgtaaaatgcagattcactgcatattttcctctgccccatttgtttttgtcgtctgatgtaaaaagtgcagattcactgaaccagacaaaggcatgaatgactatttttaaaaaaaatacagattcactgagctagacaaaggcatgcgtaactatttttccttaccctcctcttacatgaaaattgtgtgcttctcaatatcccgccctttaccctttaaatttggatccctcaaaatcatcttcagagaaaggcatagatctgtctcccaggcacatctttaactttggcaaataaatctcctgaaatgataagagacttatctcattggacaatatccaaacacttgtgcccaagtgtttatagaagcattattcacaataaaaagataaaagtatcacaaatgtccaccaaccaacgtgttgcatccatatgttagaaatttactcatccataaaaatgaagtactgatgcatgctgcaatttggagattcaaaatatgaagctaagtgaaagaagccagatccaaaggtcacatactatatgattacatttatataaaatgtccagcagctggaaatccacagagacagaaagcagattgatggttgcctggggctgagcaggggtagggagaggagagggactgctccgtggaacggggttccttttggggtgatgaaaatctttgggaactagaggtggcagttgctgcaatgaaaatctactaaatgccacagagttgtatatatatatatatgtattttttttttgagacggagtttcacttttattgcccaggctggagtgcagtggtgtattctcgcgtctctgcaacttccgcctctcagtttcaagcgattttcctgcctcagccccccaagtagctgggattgcaggtggccaccacaacacctgtctaatttttctgtatttttagtagagacggagtttcaccatgttggccaggctggtcttgaactcctgacctcaggtgatccacccgcctcggccccccaaagtgctgggattataggcgtgagccactgcgcccggcctagagttgtatacttttaaagggtcaattttacattatctgtattttacttcagtgaatggaaatttaagaaaaaagagcatggttctatgcagatttcttttatcttaaaaagttgcaacatgacccagtgttttttttttttaatgtgaggtaggattcctaataagtgagagacgtcctaagtcccacagtgttcagacatgaagctgatcttttcaccttacatcttaaattctaatgtggctgagtacagaattcgggatgagctccaggattcctgcagtctgtaactttttctgacactttaccattccacccgtgatgacggattgttcctgacttacctttggaacataaaggctcttacaccacgtgtctggatctggtaaaagagattacacgagattgagagccttacatgtctcaggcaatactcatcctcaaaccaaccctgagatatgggtcattatcttcttctataaggaggaaaatgggaaagaggtgttacatgatcaaggtcaaccatcagtaaattccaccctcatgtcttacattaacacctgttcatttcctccagggatcactcttgcccaaagcatggagacagaatccatggtatcagctgagggctgtgagcagggaagaaaagaggtagtaaggaaggagaaatgactcagatgttttgacagagagtgaccctgtttgccccaagaacacttgcgggttacagtcctaatcttacccccaaagtgttcccagaccaaactgagggtggggctgctatttctcatggcccaataatgagatgcggatgaactggggagggagagagtttttatttctgttaccggttacagggagaaggcctggaaaacattgccagaccaactcaaaattacaaagtttcccagagcttatataccttctaagctatttattaaaaaatgcagctattttctaagctatcttctaagctaagctaagaagatagctaagcttcttctaagctaagctaagaagatagctaagcttcttctaaactatctaagctagataagcttccaaactatcttctaataagtttagaagattctaagccattaagctacctaagctatagtcttctaagctatcttctaatctaagcttagaagcttagctatctaaactaagctaagatattctaagcttctaatatccatctttcacatcacccatttcctgcatgggatatggcacgccagagacccaggggatgttttctgcatgaatctagtaataaacaaatacctgcatccctcagggctgataaagagtctataaacctcagatggagagtctagaatgttagaacataaaccagggaatgtgtcagatgcctaagaaccttcacagcaattctagcaattcttcataaaagcagctgtcatttactgagcatagttcatcaggttatctctaggcatataatgaaaataataatcatagtaaaaaatagcccacattattgaatgactgctaagaacatggtagaatttcactttgtacatcacatgtattaactatgtagttccccaccaaaaccatgtaaggtagatactagcactatactaagtttatatatgacacaatagcaatgtgggtaactttccctaactcacgaagttaaaaggggcagagctgtgatcaaatctcaggcttcctggctccagagtcttccctgttagttcaactgattgcttcctatgagaggtagaatataataatctctgattgtcaacccaccaaatatccttacaaagaagacatttttattattgcaattttatagaaaagcaaagtgagcctcagagaggcaaagtgactttcccaaggagacagagatagcaagaggcagatgtaggttttgaaagtactgtgatgtaactccaagcctgttgcttttttttttttttttgagaccgagtcttactctgttgcccaggctggagtgcagtcacgtgatctcagctctctgcaagctctgcttcctgggttcataccattctcctgcctcagcctcccaagtagctgggactacaggcacccgccaccacgactggctaattttctttttttttttttttttgtatttttggtggagacagggtttcactatattagccaggatggtctccatctcctgacctcatgatcatccctcctcagcctcccaaagtgctgggattacaggcgtcagccactgtgtctggccccaagcctgttgctttttagtcaataccctataaactggtttcctgaacatggtctggaaagagatgacctgaggtggatgaggaagagccaactctaaatgccaccctgggccgtgctagtggttgtcctgctgggtgagcggctaacatcataagcttctgaattccattcctattcagaatccatggagtggatgtgtctttttccaatttattctgatgcattcgctaaatatttattagacaccttcagggaatctctatttaggagtctctaagagggggcccagctcatacaaatgtatcaactaacacaccagaaaacagtggaagccttgttgcttcctggactctgaccatggtgctgaaactagagttcatggcaacatcccagtcagtgctgtggacagcgaccacaggagccactctcctggggctggggcctgatagaggaaataggaatggtgtctagatacagggccaggtctgttggagaccttgaataggagccaaaattgaacaggatgtggggaagctcaagaggttgatgacgtctagctggaccatggaatgttgctatctaaataggcaattatttttgtactctacaccagggtaggcagacaggaagccaagagggaagcatcctggaacttccttcgtcatacagaatactgagtttccttggctgctcatgagtgtatattatgagtgcaataaagtttgagtgcgattatcccttagactaaaatctgtttttgcaagagttttcttcagagaaatggaaccaatcagatgtttatttatgtatatacctatcctctgtctatctagctatctgtttatttctctaggaatgtgcattatgaatacaatatggcccctcttactgtgggccaacgtttgttccatgttttagccaatgaaccagacaaactgttagagccatgtctagctcactgagatgcaacattaaatgcaggatctctccttagtaggtccatatcaataacattggcctggctcaactttatcttcctttcaccattatccaacacccttaatgtccattcgcacacatgttccctagatttctaggtgtataaatcagaagaacttagtagtcactttggagtgtagcacatttccccatggatcacacattgaacctatggcttagaagcaaagatgggtagtgggggcggatcctgaggaaaattagcactgtcttgcatggcaactgcctccgcggaggccactattgtttcctcagacagtgcagggttaatctcctcagatgcacggggagagaatgcttccattgtcaaagagcatgattaaggaactcactgtccttaccttcatcagtgtctttcacacatccctattccaaatgtcaagattccacaccttccgaatcaatacccttaaagtagacaccctttgaggctgggaattccatttgtattgtaatttagccacttgaagggtgagtttctgggtttgctttttctttttctttttttttttttttgagacagagtcttgcccttgtcccccaggctggaatgcaatggcacgatctcgactcactgcaacctccacctcctgagttcaagcaattctcctgcctcagcctcttgagtagctgggattacaggcaccagccaccacacctggctaatttttgtatttctagtagagacgggatttcgccaagttggccagactggtca[131 bp omitted]atcttttagggcagatatagaagtcttagctcatttatgtttgcacttgaactgaaaattcaaatctttgaattcatcctcttctttccccaactttgtccagtgacaacccagccaatctcattatgctcattagttttcaaaaacattcaaaagtattatgtacatgatcactcagattcttttttttttttttgagacggagtcttgctctgtcgcccaggctggagtgcagtggcatggtctccgctcactgcaagctccgcctcccaggttcatgccattctcctgcctcagcctcccaagtagctgggactacaggcgcccaccaccacacctggctaattt[144 bp omitted]agattcttataaatgtttgttaggcgtttccaatgatgacatttggtgtatccctatggccacatcatgttatgcactatcaacactactggaaatggagtcattagtgtttttaaatctaatcaaattagaaagccgatttcagaaactttggatccaattcagaaaactcatccttaaaaattctgttcctttggaatcatccctggaaccaaaatgatttttttttcaagggttctccagagaaattgaaccagcagaatgtttatttatgtgtctatctgtgtatctatgtatctatctatgtatctatccatgtatctatgtatctatctatttatctatctatctatttatttgtttatctattcatttacctaggaattggctcatgtgattgtaggagcttggtgagtccaaaatctgcaggacagtagagtatcctggagactcaggaaagagttgtagcaaactaaaaaatccaaagacaatctgctggaagaatttcttcttgctcaggggagctctctgctattactttattgttattttgctcacaagacatgtatcatcctataacatattggattttctattaatttttgttgttgtctaatatccatctttctcaactataatattgattcaatacagacacttttttagaagtctttctgtcttttttctgatacatcttatacaccaagaatcacgtttgacccattagatacttaatgtgtgcccatgaaaacagtgaataaaagtgtctccacttcttccaagtttatttttaacactggagcaaatgatttctacttgattctctctttttttctcccttccaggctgcctttagtgcaaagtcctcagaatggaaaaatattcttgggggaggcaaaaccttaaggttggcaagaaacaaaccccagccttatccttactttccttctctcagttagatctcaatgtccttggctgcaatgccgtctctacctagtctacttcaagcttcccagatatgatttcctctctaagtttctctgtctcttcctgtctctgtctctctattgttctgtttctttccatctctctctttcttgctccaactttctcagtcgactaaaactaatagctacgaatagctttcagtaatttgaacatttcacggatgtttttctagatcaactgaaatccctatgcaaacactgtcactgtacttgcagatgaaatgataatcacttcccggcaagaaaaggatctcatggtagtcttaagcctttatctcagggttaagatgcccccttttgtggaggtgcttagactgtgactatggcagttgctttcccagcaagaaactgcatttggtaagtggaccttctttcagttagagagccatattcttagagatgtagaatatttgttgcaacatatatgtgtgtgtgtatatatatatatatatatatatatatatatatatatatatggtgtaaacatcccggtctatttcccctaaggtcaaaactgaacatggaaaagaaacatggggcaggggtattttctgagagttcctgagacacagaaccaccccagccttcccactcagggctgcctggcatctcctgtttaccttctctgtcatagccccatctgaaagactctgtctgaataaatataccaaacctcatagtcttagctctcctctttgtacgaggggtaagagtgtgttcaggtcttggctcctgttcacacacctgttgtctaatggcaactggtacttaggacatttgaaatatctctggtggctgcatgctgcactttggttggcaatggctgtacgtctctgaaaaccttctgtgatgattgcaaaacggtacactttcatctcctttcttatgggttccggggagccgaatgcacttgatttcaccagtaatatatgtctatagacaatttctcagatcggcgtgaagaaggtaaattatatctttcatttagaaaaatataaatctcacttttacaaaacgtgactaagaattgtcaaggcttagagagcaggaataatcagggactatatgggtgttcatgtctaataaatgcaactctgatccttaaccgtatttaaaagcgctttcagagttccgaaaccttttcatctgctccagattcactgggttctgaagccaaagctttctgaaactgttcctcctctcagcccctaagtggtgaacgcttggtctgttctgacagctgagatcctagccacgggagcgtgaggtgaggaatttcctgtcaccatcccagaaagtaaaatatagcctcattatttcctaattgtgtttccataagaaaaacaaagaattcgataaaagaaacaaagaccagtatttactttttcataaatgattgtagttactgaaggacatatggggcccgtaatcacaacgggtctaggactcacaggtattttctcgtctccattatttaccataattgtgtcattctcactcctgcttacatgatttatttggtataatttaaatgtatttgtatgttttctctatgacttaatgggcaacatgcccctttctctaacttgtgtttgttggtttgttgatctctgatacaaatttgctaaatatattctagttgttgttataaaatattttctttccaagaaaatttttcaacaggttcatgtgcacaccatatatgaaattcatattcttttcttattctcttatttttctccccatcctctacaacacttgggccaaactgttatggattattgtgtatccaccaagaaatggctttgagtttttaaagtatctatttctctgaactaatctgtaatttccaagaatctaatatttctcaatttttaacaccaattattttactttgtaatttaacaacttgttaattattaaacaagtaaaaaatgcaaaaataaaaactatgttttgatagtttctaatttatattctttggaaaatgtctaaattttaggaaattaaaatttttttcgaattgaatgtggctagaaataataatttttcactgcatggcattacgtaagtgtaatagaattctactctcatcctactttagataatgccaaactgagaaaccattattaatttattttgtttttgtctagacatgaaaatgaaaagttgccatcagaagaatcattatggaaagtgaaaatatggtgctaaattaaatatgtggcaaataaatgtgtttttttaacttttaggttcagaggtacatgtgcaggtttgttatataagtaaattgtgtgttacaagggtttgaagtacacattattttgttatccaggtgataagcatagtaccaaataggtagtttttctgtcctcaccctccccacttcctcaaccctcaaggaggtccccctgtgtgtgattaccaaggaggccccactgtgtgttattacctcctatgtgtccattatgtattcagtatttacttccaacttataagtgacaacatatagtattcagctttctttttctgtgtcagttctcttagaataatgaccaccaggtccattaatgtggctgaaaatgacagtatcttattctttgttttgaggcagaatctgtctgtcacccaggctggagtgcagtggcactatctcagctcactgcagcccccgcctcccaggatcaagcaattcttgtgcctcagcctgccgagtaaatgggattacaggtatgcaccaccacacccagctagtcttgttttgttttgtcttgttttttgagatggagtctcgctgtgtcgccaggctggagtggagtggcgtgatctcggctcactgcatcctctgcctcccggattcaagcgattctcctgcctca[134 bp omitted]gcctcccaaagtgctgggattacaggcatgagccactgcatctggccagtttttgtattttttttttttagtagagatgaagttttgccatgttggccaggctggtctcaaactcctgtcctcaagttatccacccgcctcggcctttcaaagtgctgggattacaggtgtgatatatatgatatatatgtgtcctcatggacacagagagggaacttcacacaccagggcctgtcagggggttgggtaggggggtaggggagggataacattaggagaaatacctaatgtagacgacgggttgatgggtgcagcaaattgccatggcacttgtatacctatgtaacaaacctgcacgttctgcacatgtatcccagaacttacagtataataataataataataataaaaagagtggtctctgggctataagttccctgcagaggattgcatcatctattttgtcactgcccccaccctaatgtttgtaggctcatatattatgccagttaatatgcaaagacttagggattcagtactgaataaaaatgagaatggccatggcctcatattgcttatgagactgccaaaaccgaacgtggtgtacataattacccagatgtatggtgacttcttaaaaaatgaagcatagccttgccatgtaatcttgccattttacttctgtgtatatatccaggggaagtcaaagcaaatacttgagcagatatttatacctccatgtgcacagcagcattacttacaacaaacaaaaagaataaaccacccaatgttcatagatggatgagtggagacataaactgtagtgtagacatacagtagagtatgtatgtcttacaaggaatgaaatcatgattgccacattctacaacacgggtgaaacttgaagatgttatgcagactgaaatcaggcaatcacaaaaagacaagtattgtatgattctatttatatgaagtgcatagaataggcaaacccatagagacagaaagtagaatattggcttccaggggctggggttgggggagagaaaatgggaattggtatttaatgcatacagattttcagtttaggatcatgaaaaagatctggagatggatggggatgatggttgcgcaacggtgtggatgtacttcagcaaggtgctgtggctcacgcctgtgtgtctgcgtgctagggtctcgggggttttataggcacaggatgggggcgtggcaggccagggtggtcttgggaaatgcaacatttgggcaggaagtgcccgtcctcacctaggtctgtgagggtggagccctagccagggaccacgccctcctctgcccagcacttcccttccctcttctgtattatttaaagggactacacccttcccttcccagcacttctttatcaccacttagaaaggccattatcaaaaagacaaaaaataacaagtggtggctaggatgcagagaaaaggggactcttgtgcactgttgaaggcaacaagaaggagtgtggtcattacaggaaacagtacataggttcctcataaaactaaaaagagaaccaccctatgacccagccagcccagttctgggtatagatcgaaaggaaaggcaatcagtatattgaaaggatagcttcaccctggtgtttactgcagcactattcacaataaccaagatttggaagcaacctaagtgtttatgtacagatgaatggataaggaaaatgtggtacatttacacaatggaatattacccagtcgttaaaaagaatgaaatcctgtcatttgtggcaacacggatgagcctggaggaaataagtgagataagccaggcatagaaagacaaaggtagcgtgttcttactcatgtgtgggagttaaaacagttgatctcagaagcagagagcagagtcgtggtaactagaggctgggaagggtgggaagaggggagagggaaatgctggttaaaggatacagaattacagctagatggaggaaataataagttctggtatcctacagcactgtagggtgactatagttaacaatagtttactgtacagctagatggaggaaataagttctggtatcctatagcactgtagggtgactatagttaacaatagtttactgtacagctagatggaggaaataataagttctggtatcctacagcaccgtagggtgactatagttaacaatagtttactgtacagctagatggaggaaataagttctggcatcctatagcactgtagggtgactatagttaacaatagtttactgtacagctagatggaggaaataagttctggtaccctacagcactgtagggtgactatagttaacaatagtttactgtacagctagatggaggaaataagttctggtatcctacagcactgtagggtgactatagttaacaatagtttactgtacagctagatggaggaaataagttctggtatcctatagcactgtagggtgactatagttaacaatagtttactgtacagctagatggaggaaataataagttctggtatcctacagcactgtagggtgactatagttaacaatagtttactgtacagctagatggaggaaataagttctggtatcctacagcactgtagggtgactatagttaacaatagtttactgtatattttcttttttagatgtttttattatactttaagttctagcgtatcctagaagctttattcagtactgaatcccaaagtctttgcatattaactggcataatatatgagcctacaaacattagggtgggggacagtgaaaaaataaatgatgcaaccctctgcagggaacttatagcccagagaccactctttttttattattattatactttacgttctggggtacacgtgcagaacgtgcaggcttgttacataggtatacatgtgccatgttggcttgctgcacccatcgactcgtcatttacattaggtatttctcctaatgctatccctcccccagccccccagccccagacagtccccagtgagtgatgttccccgccctgtgtccaggtgttctcattgttcaattcccacctatgagtgagaacatgcggtgtttggttttctgtccttgtgatagtgtactgagaatgatggtttccagcttcatccatgtccctgcaagggacataaactcatccttttttatagctgcatagtattccatggtgtatatgtgccacattttcttaatccagtctatcattgatggacatttgggttggttccaagtctttgctattgtgaatagtgccacagtaaacatacgtgtgcatgtatctttataatagcatgatatataattctttgggtatatacccagtaatgggattactgggtcaaatggtatttctagtcctagatccttgaggaatcgccacactgtcttccataatggttgaactaatttacactcccaccaacagtgtaaaagatttcctgtttctccacatcttctccagcatctgttgtttcctgactttttaatgattgccattctaactggtgtgagatggtatctcatagtggttttgagtttattgtatgttttcaaagagctagaactcctgggctcaagtgatccacctgccttggcctcccagagtgctgggattaagtgcgtctttattataacttataattgacacataataattgtatatatttgtagggtatagagttgatatttcaacacatatatataatgtgtaatggttaaataagagtaatgaacatatccgccatttcaaacatttatcgtttctttgtgttgaaaacattcaaaatcctctcttctagctatctgaaaatatacaataaactcttaatgagtcaataggttgtcgttggtggcacttcttgtggttatagggattactctttgctgtccgtgtttgttgaatggttcatttcttacacacctaattatccatggaaggtagttcttagtgctctcctgggggtcagactgaaaaagaggggattgttccagctatccctgctgcatgatctcaactcctccaaacatatcatctgcttagggttttgcccagcacaggagggtctagtgtgaacctcacactcacacgtgggacagacacccatatctgacaatgtcgcggtgaatctgtttcacacaaacaagggagatgattcagtgtggaccacgggcccatgtcaatgagcagagatatttccagcgcctgtccacacacacaggggaggaggaaccacagcttccagcctcacccaaagccctgactcctccctgcctgtgaggacctggggttcctcttctgtcccacacacagaggtggaaatctcccccactaatgagccctgggtggtcccaggcaccagtggtccctcagctctggtctatgatctgtcttacggcaccctgtctatttcaggaatttgttatttaactttttctacattaagaccatgactacaggattcagaaatatcgtaactaggtttctcagtgttcaaagttgacgtcggctcttcatgggggcatcaatcatcgtcctccactgtggagcccaacatcaggatcctctcccatccccaccctcctgtcttaactggtctagaaattaaccatggctgagcccctcccatgtcctgggcaccactgacccccatagccactgtgatgagtggggatcatgacaacaggctccaaacgtggaaattgaggctcagggatgggatattacttcccaaggtcacacaggcaggggatgataatcaggaattaaataaaagtcacctcccaacccaatgtccgaaatcagagctcaaacctaacgtaattgctccaaaaaccttaaacgtggattaaggcacagaggaaggcccaggaagtgaggggcactgagaaggcaggaatgacttagaggtttgttctcaggggtggggggtggatgctgctgcaaaaagaaaggaaggaaagacagagggaaggaaggagggagagagggagggaggaagaggacggaaggaaggaaggaaaaaaataggaagtttggtagaaaggaagagactgttcttgaagggacaagaaagggactgtttggcagaaaggaaacacacactccagggacagaaaaacatatgttttattctctttattccctgcatctctcttgtgttctcactgccacatgcagctcagcctcggctgcacagccaggtgtcaggtgcgtctctgctgatctgagtctgcctgcagcatggacctgggtcttccctgaagcatctccagggctggagaatcactgaccatggtaaggaccccgcaacgctgagctgatggatgggctgaaggagggagggagaccccatggggaggctctgagcgggaggaggtcaccctcgcctgaaaggggctgactccggaaggcatcaggtctatttgctgttgtgtcccggctctcggtaagataaagacagatcaggcagacagtggcctgggggcagggagaccccatttctctctgaaatgtctgcagagagcctggtgcccacccccatctcagccctggggaaatgagagccagcctcctggggagggcagtttccgttcctgtgggctgcggatgagataaccccatgacaagaaagacccagcctctgaggggccacaccctgtgtgtctctctgtcctgccagcaccaacggctcatccatttgcaaagctgaaaggaggcagaggagacgccatgaccgccgccctcacagccttgctttgctttgctttggtgagatttgaagaggagagaggaaaccccacaggccctggtccatcaagagatcccagggctttagggagctcccaggcaggggaggacttgctcaggcttcacggggcaaatccctcactgggaattctcttccagggctgagtctgggccccaggacccgcatgcaggcaggtgagtctgtccccagctctcccaggtccctcctcctcaccctggacagttggggatggagacagcagttctgggcaggcagctgggatgatctgaggggtggggaaggtcttgggatccaggctttgatttccttccatgtactctccccaggcccaccctctgggctaagccaggctctgtgatcagctggagaagccccatgaccatgtggtgtcaggggaccctggaagcccaggagtaccatctatataaagagggaagcacagagccctgggacagaacgaatccactggagaccaggaacaaggccagatactccatcccatccatgacacagcaccatgcagtgagatatcagtgttactatctcagccctgcgggctggtcagagcccagtgaccccctggagctggtgatgacaggtgagaggacactcaggggtcccagccccaggctctgccctcaggaagggggttggctctcaggggtgtctccctctcacagcccagccctggggatgatgtgggaggtgggagccccatttaacatggtgcctccttctctcctaggattctacagcaaacccaccctctcagccctgcccagccctgtggtggcctcaggagggaaagtgaccctccgatgtggctcacagaagggatatcaccattttgttctgatgaaggaaggagaacaccagctcccccggaccctggactcacagcagctccacagtggggggttccaggccctgttccctgtgggccccgtgacccccagccacaggtggaggttcacatgctattactattatatgaacaccccccaggtgtggtcccaccccagtgaccccctggagattctgccctcaggtgagggagccacggccttctctaacacactttccggacagctgacaggttgtggggagtttggctggtgactgaatctggaaaggacccacagtgatgtgttgatggatgggctgaaggcatgagggagaccccatggggaggctctgacatgggaggacagagctctccccctgtcctggcccctggagagaccctgaccctccagtgtggctctgatgtcggctacgacagattcactctgtacaaggagggggaatgtgacttcctccagcgccctggccagcagccccaggctgggctctcccaggccaacttcaccctgggccctgtgaggggctcccacgggggccagtacagatgctccggtgcacacaacctctcctccgagtggtcggcccccagtgaccccctggacatcctgatcgcaggtgaggagcccagcgggttcagtcagggacccgggctcggcacaggcattgccgggggagcccaggtggtgatggccgggatgaggggtgggggtcccaagggagggagagacagacagagacaggggatggggggagggggagactcagaaaacagacacagagactgagggtcccagggagaggtctggggaggtctcagctcagaacaaggtggggcagcccctcacccatctgtcttctgtccaggacagatccctggcagaccctccctctcagtgcagttgtggcccacagtggcctcaggagagaacgtgaccctgctgtgtcaatcacaagagtggatgcacactttccttctgaccaaggagggggcagcccatcccctgctgtgtctgagatcaaagtacggagctcataagtaccaggctgaattccccatgagtcctgtgacctcagcccacacggggacctacaggtgctacggctcactcagctccgacccctacctgctgtctcaccccagtggccccgtggagctcgtggtctcaggtgagggcgctgaccctgtcctctctgagctcaaaggctcagctcaggccctgcccccagcagagctctggacactaaggaaagaggggagtgaagggagagggtccgcaggggagggtccagcccatgggaagatggaaatagacagggacctcccacccctggctcccacccctgaagtctcagtagagtaaagtgcagggagggctgggaggagacggggggtgaacctcaaaggagttgagattagactgagggtggaagacggaggccccacctgctcccatcctggtgtctccacctcagaatcagagcctctgtgtcccagtccccaacagacgccctcctggagagagaagcatccaggctgccggtgccacctgcatccacccccgacccccccccaccccgccccacttcctgctttcccctgcagcctccccagcactcagcgcacacctgagcctcacagggacttgcacgtgctcccgcagcagctcagggaatgtgcaccgctcctcttctgcgccgttgacattttttatttgggtttttaaaatctcatattggcctttttgtccaagctggtgaaagtagatttgcagcatcacctatttttattctcacccggtttcgtaatagccctgatctcacgtgctccctgaggttttgtaaacttcaggtagaaatgtggacttccttcgttctggacatttgctatggagggggtagggcttatcttttcagaaaaagtcaaatgactggtaccactccttgaaaccctacagcactttccagacctcagagggagggagagagaggcagagacagagacagagagacagagagagagatattggggccgctctttcctggccggttcatcctggcctattctcaatccaccaaggccccgaagctcatctcccctcctcctctgcctcctcctccaccctgtagacaagcggccattcctttctgaagaacaggctgagacctttctgggacctgctctttctggagcctctgttgctccctgtctgggtctccacacgcctccttcctggccctttttcctattgaggaatcagcttcaatgtcacctccaagtgtgaccttcactgacgacacagctcagcccagtcctgcctgcttctcatttatgtcaagtaattaaccaacctacaccatgcggctgaattccttctctctctcttccactctctgcatatacgtgtgtgtgtgtgtgtgcgcgtgtgtggtcacaccaacatcttacgtgacattgaaacctagttatccgtatatctatacaaataatatatattcacacataaatataggtctctaccaatatatctaaaaccattgctacgactagtaaatttccactgctgtgtttctatatgtttgctgtttgtctccaggtgaacccacacttcaagaaggcagagatagtttttaaggcccactatatatataaaacagatatatatttgtgtttgtgtttttctgtgtgtgtatcacattctacctgttgctgcctatacgaataattagctacctagagattaaatggacaatgaaactccaggtgaagtggctgagggcatgaaggggaggcagccccagaatttcacccctttgtgcttctgacattgaggctcccctgatgactaaccctcatccacggagcctgggtcctcagctggtggatccgtgaaactctcatctccgggggagttggctcatgttctcctgtgtcccaggctgcacagagagcacacaggccttagtgacctctgtactggggaccactttccttgcagatcctgagctctcaggatgcaggaaaactctctcccagatgactcaggagcaatgtttaaatccatagaacacaggaaaactgaaatcgttcaatgaggagactagagggaatcctgctagcggaggaagaggttttttttttttttttttagaaattctgtaaaagtcacatcatgagacattaagtaataaaaaaaaaattgcagagcccaggtgagaggctgggctcaggtctctttttctctgttttgattctctggagcagctgataccctcagcccatcacaaaacaagtctgactctgagactggtatgtgaggagatactctcagtgatggggctggcactgagggttgggtcctgtgaaggggaggtgggtgccctgggtggacaatctgatccaccctgacctctgtgacctctttgtccaccatccccagcctcacaccttcaggattacgcagtggagaatctcatccacatgggcgtggctggcttgatcctggtggtcctcgggattctgtcatttgaggcttggcacagccagagaagcttcccaagatgcagccgggaggtgaacagcagagaggataatgtactttatagagtcgtgaagcctcaggaacagatctgatgatcccaggaggttctggaagaaaatctagggccgatgctatctggactgtctgctggtcatttccagaggaaggaatcaatgtccgagtgcagggacattttctggggtgatccatggagaaccattaaaatgtgatacctttcctctccattaatgttgactttccttggttggatctgcctcttttcccacacttagacatgaggctccatcccacatggcagcgttgggtccacacctctgcacacctgcatgctctggtccatggcgtgtcacacagtcctcttcatttctcattgccacacttcctggtgtactttactgggtcttcatgtcttcagttcagagttccgcacctggtttaggaactaattcaacgggagaagatcagagtccgaccaggaaaagataaatgcaccgtgatgccctcacctcctgtgtggaccctatgagctcttccctccttatcagatgctatctgtgtagtttctcctgaaatatcaccacctggaatcaacacactggcatttgaagtcacgacccaatggtatgctaattctgaaaaagacattttttgaaatgctatgattagtggcatttaccaatttccttgacgtaaattcttttttcatggccataatcaagatgccaacgagacatccctgaatgcagggttgggaagcgttggacagacttgtcttcactcataagcaccaggcatctgatagctcacgtatacatcttattaccttccattttagagtgaataatcatttctacttcagtattttggcacaggtaaaagcagtcccattactgcgcgtatacccaaaggaatataaatcattctattgcaaagatacatgcacacatgtgttcatcgcagcactattcacaatagcaaagacatagaatcaacccaaatgcccatcaatgatagactggataaagaaaatgtgagacatatacaccacggaatactatgaagccataaaaagaaacaagatcatgtcctttgcagggacatggatggagctggaaaccattatcctcaggaaactaacacaggaacaggaaatcaaacgctgcatgttctcacttacaagtgggtgctgaacaatgagaatgcgtgaacacagggaggggaacaacacacactggggcctgtcggggggggggtggggtaggggtagggagagcattaggaaaaatagctaatgtatgctgggcttaatacctaggtgatgggttgacaggtgcaggaaaccaccatggcgcacattgacctatgcaataagcccacacattctgcacatgtaccccggaacttaaaataaaaataaaaattaaaattaaattatgacaccatgatcctagcatatccaaaaaagacaaaaatgccaatatcaaa[137 bp omitted]cgtggtgaaaccctgcctctactaaaaatacaaaaattagccgggtgtggtggcactcgcctgtagtcctagctactagggaggctgaggcaggagaatcacttgaacccgggaggcggaggttgcaatgagctgagatcatgccactgaactccagcctgggtgacagagcgagactccgtctcaaaaaaaaaaacaaaaaaaaaaaaccctcaaaagctcaggcagcaaaagcaaaaataggcaaatgagatcatagcaaactgcaaaccttctgcacaatcaaggaaacaaacagcagagtgaagagaccacctacagaatgggaaagaatatttgcaagcaagagattaatctccagaaaatacaaggagctcaaacaatgcagaggttttgaaggatggtgatgagaaggttctgctacttacagaaaggaagtttaggagaaacaaaaccacaaacctaggtggtgggatggcttgatctgcttctgtctgtgactcacttaacagtcttaaacacatctccctaagcctccttcccccggtgggattcctgggtcttgtgaggacctcatcggtccctctggtaaacccaggcacagagtggagcagctcttgttttctcaggatcttccccttcacatacaattaacgcacccacacgatgctactcttagaacccttcaaataaatgtttcccggttcattcactaccagaatccaagctcagcttgttccccagcttaggactgagtggtatcttggaggtagtttccaccatagcccccttcctctgctataaggctcagtgacacaccagagacaccccctccagccaggctcctggaaggtctggatgaagactgggatgctgaggcattgctcagcaatgtggcttaactcaaacttctatgtgaaacttccaaccactttcagcaaggggtcacttccagcgtcttggggtgtgagggcactttggttggtccctgcaatatcagaccctataaagatcctacaaacatgttgcagactctttgaagattctggcactttcagacatgctgttgggaaatggtgacacccataaccttctagttccaggacagggagccttagcccagggctatgttttctgagggtcctcaaagtaaacagttctatgtgccaggagaaccctaaatctcatatggttctaagggcagaaagccacacacgcaccggcaaaaagcaagagattcaaggaaaagctgagcaaagacagacaggaaaacacacacatgatgagccagcttgtagagctagaactgagatggagagaggcacgagtgggtaacagagtgtgctccccagaacaggtggagagaatgcctttttcatgccctgaggataggctgggtaaggcttgtgctcgacagtcaaggactatttttttccccaggcgtctacaagagaccttccttctcagctcaactgtgccctgcagtaagtaatgatggagagaatgtgactttgctctgcagctctggaagctcatttgacctgtgccttctaacgaggaaggtaaggcccctggacactggctcactggggtgcagagacagagtggggcattcaggccaacttctctctgggtcttggggctggtgatgggacctctagatgctgcagctctctgtcgatggctctgcctgtgagtgatcagccctagatgaccactgttactgggggtagcccatgcctgctgcatgccctgtgaaacactaaatcatatagccacgtctgagggacagcctgctggagacatgggaatcttagggattccagacaaaatgaagcaatgagaaacacaaagaggaaaagagaggttgagtatgacagtggtgtcagggtgtagggtggtagacagggcagctccacactctccactgcttcctgtctggaggcccactttggggtcctacttatccaggtgagtgaaggaagaggtcaggacaaacacaggaggtgaagccagatacagtgtggggagataagcagtggcctcagcctctagcccttttccatcttccagaagcccctcctgagctctcatcacagacagatttcccatttggaaacccagatatttatcatgccgggggggggaggcaatgtctcttgattatggggactttccatcaccaggcacctgctagtcctctctataccttcccttcaggaaaggaattgtccctcatgggattccagggaagagaccccaggacccctatcagtcactagggagatgacagagtagaggaagtcaggggaccaaccctccacagagaatggtcctacttcagtggggtgagggaaactctcactcatccatttgctgtcctgttacctcggaaccctaagagaacttgttagtcacacacagaatctacccctgaatgtggtgtgcaaagtggggctcttagcctccagtgtgaagtccctgggaagatggaatgtccctgtgtgagtgaaggctgtgccaccgcccagctatgtggccttgggctaggcaacccctcccaggtccccagttccccatctgcatcggagactgtggccagtgcgggaatccacaaggcccttcagcctccaaagctctgggacagaggcctcgtccacagggaggaaggggtcagagtgacctgagtccctactcaggagcgagtctaatccactctccatcggggcctgtggggaagggaagatgaagaaacggagcctgcacctggctatgtgggcgcagtagattaaggggaggatgagggttcctgagagtgtgtcatgtggcagagaccctgcagcacactcaggaagggctctggaaggatccaaggaaattttccaagaagagggcagagtaagtgacagagaccctcaaccatggatttcactgaggtgcccatgatgacatagggagaacgggggtgtctgggcaggaagaatatcgtcagggtgaaatgaatggtgatgagcttcgtgtcagagctcctgtggagggaggggcctggcccacatgaaaaggtctctgatcctaccccagcccccagcccctgttctccaggatgacactgtgggaattccatcaggaggggtgtgatagggctggtcttcctggctcgattcacaacactggctggggactgggaacccatggggagccacaggtggaaagggaggagcctcagtgaacccagcaggaacaaacatagggtctgacatgatggaactcacttcctggaggccaagaaagacacttgcgggacaaaagggaaagagcggtggcttgcttagttccattcactgacaacccacaggagatgtccagtccttttttgatttattattttattttattatattttattttattttattttattttcacatggagttttgctcctattggccaggctggagtgcaatggcacgatcttgactcactgcaacctccacctctcaggttcaagcgattctcctgcctcagcctcctgcatagctgggattacaggcgactgccaccacagccaggtaatgtttgtatttttagtagagatgaggttttgccatcttggccaggctggtctcaaactcctgatctcatgtgatccgcctgtatcagactgccaaagtgttgggattacaggcgtgagccaccacacccagccttttgtatttttagtagagatggggtttcaccatgttggtcaggctggtcttaaactcctgacctcaggtgatccatccacctcggccacccaaagtgctgggagtacagatgttagccaccgtacccagcgagagtttcagtgctctatcggattccctgcctactccatgttgcatgtaatgttccacctcagggatgtttctctcctttctgtctccttcctcttctccttctccttttttctttctaatttttatttttttgagacagagccttgctctgttacccaggctagagtacagtggcacgatcccagctcactgcaacctctgcctcctgggttcaagagattctcctgactcagcctctcaagtagctgggattacaggcacccgccatcacacccagctagtttttgtatttttagtagagacgaggtttcaccatgttggccagactggtcttgaactcctgccctcaggtaatccacccgcctgtggccccccaaagtgctgggattacaggcgtgagtcaccactcccagccctgaatgatctttcctctttagtgtgttctcacaaccacctctcactgagctttcttgttttttgtttttgtttttgtttttgtttttgtttttggcagagtctggctttgttgcctatgctggagtgcagtggtgcaatctcagctcactgcaacctccgtctcctgggttcaagcgattctcccacctcagcctcctgagtagctgggattacaggcacccaccaccacacccagctaatttttgcatttttagtagacacagggtttcaccatgttggtcaggctggtctcgaactcctgaccttgtgatctgccagcctcagcctcccaaagtgctggaattacaggcatgagccaccactcccagccctggattatctttcctct[132 bp omitted]gcaagctccacctcccaggttcaagcgattctcccacctcagcctccctagtagctgggattacaggcgcatgccagcacacccagctagtttttgtatttttagtagagacaggggtt[132 bp omitted]tgccagggaataagatagaaaccattccctcaaccacattctagtcatggtccctattctcatgtttccacttctctctctttggtaataaatcaattaattgagaaacaagtagctaaatgttcatcttctgctagtctgcatccccttattttcccagagcctcccctaatgaaactgactttatttactgaacgcaggaaatgggtctctccagatcaggatgactttctgctgggaaatatttgtctttgcatcagtggggaaaaagaaagccgatgtcatgagtggaggctctgagaaaataagggctgtgttttcagtttagacccagctaagttgggagctgacatagatatgatgttgggtccaccctccacgggcaggttttcagacaaaggatccctggcaatcaggggacacctcaggtctgggctgagatgtgtgcagagggcctgggtcctcctgagcccctgcactggggggggaataagagacaggcccagcaaggggctgtccacttcctgtgggttcacagctgtggggacccaggcaggcggcagcaggctctgacttaaccacatccgtgcatctgtctgtcatggagggccatgtggtcacctgtcccacagctggagcacgcagagcaggcatcatggtgtccatcctcactgttcttctgtgcctcagtcagtggtggagagacgagggacaggaggggcactgggctgaggtggggagggtcccacagcagccttgttcaccagagagcctcagggctccagtggctactggtgctccaacaggaagggaagcagccacacctctgtgttccaaatcccccacaggaaactcttctccatggctgagtctgggccagaaagcccaagcacttgcaggtgagtctctgctaacctcccatgcctgacctcacactcagcacctggactctcatctcaggggcttctgaactgagggtgagaaaatcaagagggtctgtgacctgagctgggaatgaggagcgggggaggtctgtggaccccagcctgtggtttcttccagggaccctccccaaacccagcctctgggctgagccaggctctgtgattacctgggagagccccatgaccctctggtgccaggggaccctggatacccagggttactatctcaccaaggaaggaaaccccatgacctggtaccaacagagcccaccagagcccaggaacaagaccaacttcttcatcccatccatgagagagcaccatgcagggagataccactgtcactatctcagccctgcaggctggtcagagcgcagcgagcccctggagctggtggtgacaggtaagaggacactcaggggtcccagccccaggctctgcctgcaggaagggggtcagctctcaagggcatctccgttctaataactcagccctgggggatgatgtgggacgcgtgagccccatttaagacagtgtctccttctctcctaggagcccacagaaaacccactctctcagccctgccgagccctgtggtgacctcaggagagaacgtgaccatccagtgtagctcaagggtgggatttcacaggttcattttgattgaggaaggagaaaacaagctctcctggatgctggactcacaggaactctccaaggggctgtcccttgtccctggccctgttccctgtgggccgtgtggctgccagtcaccggtggatgttcagatgctatgggcattacacgaacttcccctgggtgtggtcggaacccagtgataccatggagatcctggtcttaggtatggatgtcttcctccttgccctatttatttttgagaacttactctcacggagccccatgtaggagggtggaacaagggaagtttgggactcctgagcccagagacactgagtgtgagagacagtgagacctgcagggccaggaggggagaaggaaggggtgtgggaggaaccagccctcctagtcccgactcttctttccctccaggcgtgtctaggaagccctccctcctgaccctgcagggccctgtcgtggcccctggggagaatctgaccctccagtgtggctctgatgtcggctatgacaaattcactctgtacaaggaggggggacatgacctcgtccagggctctggccggcagccccaggctgggctctcccaggccaacttcaccctgggccctgtgagggtctcccacgggggccagtacagatgctacggtgcacacaacctctcctccgagtggtcggcccccagtgaccccctgagcatcctgatcgcaggtgaggagcccagcaggttcagtcagggacccaggctccgcacaggccctgctgggggagcccaggtggtgatggccgggatgaggggtgggggtcctaagggacggagagacagacagagacaggggatgggcggggagggggagactcagagaaaacagagacagagacactgagggtcccagggagaggcctggggaggtgtcagctcagaacgaggtggggcagcccctcacccatccttcttctctccaggacagatccgtggcagaccctccctctcggtgcagccgggccccacggtggcctcaggagagaacgtgaccctgctgtgtcagtcacgggagcagttggacactttccttctgaccaaggagggggcagcccatcacccactgcgtctgagatcagagcaccaagctcagcagcaccaggctgaattccccatgagtcctgtgacctcagcccacgcggggacctacaggtgctacagctcacgcagattcttcccctacctgctgtctcaccccagtgaccccctggagctcgtggtctcaggtgaggccgctgaccctgtcctctctgagctcaaacctcagctcaggccctgcccccaggagagctcaggacgctaaggaaagaggggagtaaagggggagggtcggcaggggagggcccagcccatgagagggtggaaatagtcagggacctcctaatcctgggctcccaccccagagacctcagatggggctaaaggccagggagggctgaaatgagatatggagaaaccttggaggaatcatgcttaggctgagggtagaagatggaggccccacccactccccacctgggctcccctggcggccccaaaatactcagtgcatacctgagacgaaggggagatcatgcacctgctcactgcagcaatgcaggcaaattattcaacagcaaacctcgtgtgcaattcctttctgtcctttattttttatgtccacatatctagtttctctttctgtttctgaagatttcaaagcaatgctggcatttataatttacacatttaatttgttaggtagcgttatgatgtaaaataactgtgctctgattttctttgggattaaattaaatatgtgcattcatgatggagaataacttctcattaataatgtctttgtatccaatacatttaaaattaaactttatacagttagcagatgcttgaagttgtattcataaaaattgtggacattgtgaattttaagcattgttttactacttgaataatttgaaagtctttgattcctttctattttctaaaattagttacgtatggatgagaaagctattggtttgggtatgctaattttagttcctattaacttaccacagacacactccctttcaatcctttccgaaatgatctcttctgatttattgataataattacattaaccacaagaaaatggaggacaaacttgtttgtttctaaattatataatactcttctcacttcaaatatatatgtatgtgtttatatatactcacacactattatatatcttataatatatattatgtattatatatttatatatacactattatatatcttatatattatgtattatatatttatatatacccacacattattatatcttataatatatattatgtattatatatttatatatacccacacattattatatcttataatatatattatgtattatatatttatatatgcactattatatatcttatatattatgtattatatatttatattacccacacattattatatcttataatatatattatgtattatatatttatatatacacacactattatatatcttattatatattatgtattatatatttatatatactattatatatcttataatatataatgtattatatatttatatatacacacactattatatatcttatatattatgtattatatatttatatatacatactattatatatcttataatatattatgtattatatatttatatatatacactattatatatcttattatatattatatatttatatatgcacacactattacatatcttattatatatttatatgtatacacacactattatatatcttattatatattatgtactatatatttatatatactattatatatcttataatatataatgtattatatatttatatatacacacactattatatatcttatatattatgtattatatatttatatatacatactattatatatcttataatatattatgtattatatatttatatatatacactattatatatcttattatatattatatatttatatatgcacacactattacatatcttattatatatttatatgtatacacacactattatatatcttattatatattatgtactatatatttatatatactattatatatcttataatatataatgtattatatatttatatatacacacactattatatatcttatatattatgtattatatatttatatatacatactattatatatcttataatatattatgtattatatatttatatatacacactattatatatcttattatatattatatatttatatatgcacacactattacatatcttattatatatttatatgtatacacacactattatatatcttatatattatatatttatatatactcacactatatcttataatacatattatgcatacacatatgcataatacatattatctatacacatatgcataatacatattatgtatacacatatgcataacacatattatgtatacacacatatttacacctatgcatatatgtatgtatgtatgcgaatgtacctctgccacggcagggaaaggttctatcacacaactacagagcagttaggagaagtgtagacacaaaggaatgcagcaactgagggacatgttggcttaagtctcttcaactcctcacacacctcccccttttttggttgattctcaggagcagctgagaccctcagcccatcgcaaaacaagacagactccaagactggtgtgtaaggagatgctctcggttatggggctggcacagagggtcaggtcctgtgaaggggaggtgggtgccctgggtggacatccaggggtcccgggtgatgttgatctgccctgacctctgagacctcttggtccaccatccccagcctcacacccccaggattacacagtggagaatctcatccgcgtggctgtggctggcttggtcctggtggtcctcgggattctgctgctttaggactggcacagctagagaagtccccaagatgcagcaaggaggtaaatacatgagagaacaatgcacccttcagagtgccagagccttggcaatgaatctgatagtcctaggaggttctggaagaaagtctggaccatcattcgggaaaccgtctactgagaaagtcgagaaggggaggcttgggtcaggttcaggaagatgtctgggtgcctgtagagaacgcttcctccattaaacttccattaaatggcagtgctttcagtcctgctgttgtggatcctccgtgtctgcccctcccttcctttcgctctctgtgatgtgaaggcacgtcccccatggtgggtttgcatccacacccctgcgatcacgtgctctggtccactgtcatgtaatacatttgtctttgtttccaactaccgcattctctaaagtgaactattgattctccatcttttcagttctgagcatagatctggattaaataactggaataggtgggcagatttgtatttgggactttgaaacatgagtctgaggccaggcacagtggctcacacctgtaatcccagcactttgggaggctgaggtgggcggatcacttgaggtcagaagttcgagaccaacctggccaacatggtgaaaccctgtctctactaaaagatacaaaaattagctgggtgtggcagtgagcacctgtaatcccagctgctcaggaagctgaggcgggagaatagcttgaacccgggaggcggaggttgcagtgagccaagatcttgccactgcactccagcctgggcaacagagcaagactccatctccaaaaaaaaaaaaaaaaagggaaatatgagtctgaaatgatgccctagcaccctctctggaccctgaattcccttcactcttcatcggatgatacctgtgtactttgtccagaaatatcatctctcagaatgagcacactaacgctcgaaggctcagcctcatggtattctgttaaactggctctctgaaaaaattattttcttaagaaaactctgaacatataaagccccagatttatggtatttgctgattagtgtggtataaatacgtcctttatggccaacttcagggtgcccatatgacgccattgaatgcacagttgggaagtagtcaaaagaattgtcgttcacacgagtatgaaccagttgtaaagtttatttaaaggttataataatttctgcttcattcttatggtgtagtttcagtaaaattgtaatgtcaaaaatcatagcacaatggagggaaaagaaaaaaataggccgggtgtggtggctcatgcctgtaatcccaacactttgggaggccgaggcaggaggatcacctgaggtcaggagttcgagaccagcctggccaacatggtgaaacgctgtctctactaaaaatacaaaaattagccagacatggtggcgcctgcctgtaatcccagctacttgggaggccaaggcacgagaatcgcatgaacccaggaggcggaggttgcagtgagccgagatcactacagcctgggtgatagagcaagactcagtctcaagaaaagaaaaaagtagcaaaatcattttttggaaagaatattgaacatgtagaattttagtacattaatagtaagagtacaaattgctttaatcaattaaggaagtgtattggaattatctagttaaaaagaggaggcacatggctgtgacccttcttaattatgtacttaattatgtaccctagagataaatgtctacttatgtgtcatgatacactcacaactgttataggaatgctgttcctattagccaaagctataaaataccaaagtccacctacgaaaaaaataaacatagtgtggtaaatagactcagtggaatattacaaggtagtaaaatgcataaatgaaaataacaaacagcaccatacttcaattttcaagcataaagtcaagtaaatgaagtattatttgaaaatgtgtgcatggttatttcattacataaaggtcaaaaggagggtacatttattatttaggaaaacacacctaagatatctttgtaaaatctgtaaaatcaatagtactgtttcccctctttcattccttatcttgaaaatgcttgtctctttttctgccatggctttctaccttgcttgatatattacaattttgtaacctgcttatttcatcatatgtcataagttcacatgtatatcccatgaattattgagggtcttattcatttcaagtggcatttaggtttttaaaaatatcttttggcgaccaggtgcagtggctcatgcctgtaatcccagcactttgggaagc[137 bp omitted]aggaggctgaggcgggagaatggcatgaacccgagagacggaggttgcagtgagccgagatcgtgccactgcactccagcctggcaacagagtgagactctgtctcaaaaaaaaaaaaaaaagaaagaaagaaaggaagaaaaaaaaatcttctggcattaactattaagaaattgcactataaaaagagaatataatgcataagacggcaatttgaaaagattcagatataattttttcttatctagtaaatacttagtaatttgtctaatgcatgccttaaatacataccactttatgcagaggttgccatgagccgagatcgcgccgttgcactctagcctgggtggcagagcaagactccatctcaaaaaaaaaaaagaaaatctcacagaaggagacccagagcttccagcctcgcccagagtcttggctcactccctgtgtgtgtggaccctagggagcctcttctgttccccacagaggtggaaacttcctccttaataaccccttgatggtcccaggcactggtgaccactgagctttgctctctcttttttcttatggttccctgtctacttccagggctatcactttactttttgtgcattagaccatgaataatgttttagaaacattctatcaaatttctcagtgctaggaacaactgaggtttttgattgggtgcctcaaatgtctacccttactgtggagtccgacaacaggattctaacaagtcccaaccccttcatgccttaacctggtctggaaataaattatgtttaagccatcccataccccagccacatcaagccccacaaccactctgagaagtgagatttatagcaaaatgctccaaacaaggtaactaaggttcagacaagggatgttaatgtgtccatttacataaacaaaaaatggtagatgatcagctttccctttgaaatcagagtactaatctgactcattgttccctgaattttagaggcaggacctcaggaggagctaagaatcctaccccaggaaaattaccaatatcagaaaggaaacaatgacatcagtacagatcctacagaattcaaaagattctaagtggacattatgaagacattattcagcttagatgaagtggtcacatatcacaagaaaacaaactgtctaaaacaatctctgaaatacctagacattccctgaatcattgagttattaaataaaatacattttaaaattaaactcttttcaggaaataaacttcaatgtcccctagtgcactctccaaaacatgtagatgggaataaatactgttctgaaagacatttccctggaattacaaccattcaatatattttaaaaggcaatcataaaaatataaaaaggatatatcaggagaagaaatgtaaatggcctaaattccccacataaaaggcatagagtggcaacgtggataaaaagccaagagccaactgcctgctgtcttcaagagacccatctcacatgtaatgacacccacaggctcaaagtaaaaggatgaagaaatatttactaggcaaccaggaaacaaaaaaaaggaaggcattcctattcttatatcacatgaaacacactttaaatcaacagcaatcaggaaggacaaagaagggcattacaaaatgataaagggttcaatttgacagaagacttaactattctaaatatatatgcacccaaatttggagcaccccgattcataaaacaagttattcttcacctatgaaaagagttagacagccacacaataatagtaagggacttcagtatcccactaacaacgtcagatgaatcactaaaacagaaaactaacaaagaaattctggtcttaaagacaacacttgaccaattggacctcatagacatctacagagtactccacccaacaactgcagaatatagattcttcttatctgcacacacaaaaaacatatcatattctaagactggccacaaagcaagtctcaataaattcaaagaatcaaaatcataacaaggcacacaataaaaatagaaaaaaataccaagatgatctctcaaaactacagaaaaacatggaaatttaacaacttgtttctgaatgaatattaagagccatctatgacaaatccacagccaacatcatattgaatggtcaaaagctggaactgtaccccttgagaactcttgggtgaacaatgaaattaaagcagaaatcacaaaacattatttaaaattaataaaaatagaaacaaacttaccaaaacctttgggatgcagttaaagcagtgataagaggaaaatttatagcaatacatgcctcatcagaagtttagaaagatctcaaattagtgacttaacactgcatctagaggaactattaaaaaaaaggaacagtccaaacccaaggccagcaaaagatgagaaataactaaagtcagagagaactgaataaattgagaccaaaaagtccatacaagagataaataaaaccaagagtttttctttgaaaaaaaataaacaaaattcatagactgttagctagattaacaaagaaaaagagaaaagatccaaataaacacaaatagaactgacaaaacaatgttacgaacaatcccacagaaatagaaaagatcgtcaaagactattatgaacacctctatacaaacaagctagaaaacctagaagaaatggataaattcctggtaacacaaaatttatcatatttcaaccaggaagaaagtgaaaacctgaacagaccaataacaagttcagaaatttaatcagtaataaaaaccctactaactaaaaatagcccaggaccagatggattcacagccaaaatccaacagccatacaaagaagaactgataccgatcttactgaaacttttggaaaaaatcaaggagtgggggcttcttcctaactcattctatgaagccatcatcaccatgataccaacatctgtcagagacataatgaaaaaaagaaaactacaactaaatatccttaatgaacatagacataaaatcctcaacaaaatgctagcaaattgaatctgtcagtgcatcaaaagttaattcacatgatcaagtaagctttatttttgggatgcaaggttggttcaacctacaaagtcaacgaatgtgattcacctcataaacataattaaaaacaaaaactatatgatcatctcaatagatgcagaaaaagctttctgtaaaatccaacatcccttcatgataaaaactgtcaataggcatcaaaggaacatacctcaaaatattaagagccatctatgacaaacccacagccaacatcatattgatgggcaaaagctggaaccataccccttgagaaccgaaacaagaccaggatgaccactcccgccattttaattcaacatggtactggaagtcctagccaaagcaatcaggcaagagaaggaaataaaaggcattaaaattggaaaagaagtagtgatactgtctctctttgctgatgaaataattttatacatagaaaaccctaaagactctgtcagaaggctcctgaaactgataaacaaattcaataaagtttcgggattaaaaaaatgtacacaaattagtaacatttctatgcaccactaacattctagctgagaactaaatcaagaacacaattccatttacactagccacaaagaaaataaaatacctaggaatccatctaaccaagaaggtgaaaattctctacaaggagaactacaaaacacttctgaaagaaataagaaatgatacaaacaaatggaagaatattccatgctcatgaattaggagaacaaatagttaaaatcgccatacttccaaaaacaaattgcagactcaatgctatccatttcaaaatgcaatgtcatttttcacgaaattataaaaatttattctaaaatgtatttggcaccaaaaaaagagcctgaatacacataggaatcctaagcacaaagaacaaagcccaggcatcacattacccaacttcaaactatactacaatgctatagtaacccaaacagcatgatactactacaaaaacagacacatagaccaatgagacagaatagagaacccagaaatgaggctacatacctacaatcatctttgaaaaaattgacaaaaacaagcaatgtggaaagtaccctttcttcaataaatagttctgggataactgactactcatatgcaaaataatagaactggacccctaactctcactatatacaaaaattaacccaagatagtttaaagatttaaatgtaaaacctcaaaatattaaaattctagaagaaaacctaggaaatatccttctcaagatagactttggcaaagaatttatggctaactccccaaaaccaattgtgacaaagacagaaattgggacctaactcaactgaagagcttctgcacagcaaacgaaagtatcaacagagtaaacagataacctacagactgggagaaaatatttgcaaactatgcatctgacaaagttctaatatccagaatctataaggaatgtaaacaaatcaacaagcagaaaaccaaaaaacctcaattaagtatgacatgaacagacacttctcaaaagaagatgtacacatggccaaaaaacatatgaacaaatgcttattatcagtaatcatcagagaaatgcaaattaaaaccacagtgagataccatctcacaacaatcagagaagcagaagcaattactaaaaagttttttgttttttttaataacagatgctgacaagattgtggagaaaagggaacacttatacactcttggtgggaatgttaactagttcagccaatgtgataagcagtttggagacttctcaaataacttaaaatagaactactattcaatcaagcaatcccactactgggtatataccaaaaggaaggtaattaactatgtcaaaaagacacatgcactagtatattcattgctgtgcaattcagaatagcaaagatttgcagtcaacctaagtgctcaccaacagtggattagttaaagaaaatgtgctacatatacacatggaacattacatggccataaaaaataatgaaatcatgtcctttgcagcaacatgaatgtagcaggaggtcaatctcctaagtgaactaacccaggaacagaaaaccaaataccacatgttatcacttataactgagaaccaaacattgaatacacatgaacataaagatggaaacaacagataccgaggactacagatggggggaggagtagggaggtataggctgaagaaacacctgttggattctatgctcattgcctgggtgatggcattgttggaaccacaaacctcagagtcacacaatatgcctatgtaacaaacctgcatgcatacctttaatctacagtaaaggttgaagttatttaaaaataggaagaagaattaccctatacctaaagctaagatttttccctttgaatattcgtttcttcatcactgtagataagcagggaaagaaaaattattatactatactagccttttatgtgaccatgaggatttggggtaggtaggtggacagcttagataattcaccaggatattgatacaggctccatggctggaaataaccaaggatgagtgctgtgttttgagtggtctcccccagaaacgtttgttgaaatcctaacccctggtatgtatgaatgtgaattcatattatataaaaaggaataaatagcctgagcacagtggctcacacctgtaatcccagcactttgggaggccaaagcaggtggatcatttgaggtcaggagttctggccaatatggcaaaacttcatctctacaaaaaaaaaatacaaaaaaaaaaattggctgggtatggtggcgcatgcctgtagtcccagctactcaggaggctgaggcaggaattgctgaaacctggaaggcagaggttgcagtgagccaagatcatgccactgcactccagcctgggtgagacggcaagatattctgtcaaaaataaataaataaaaaacagaagaagaaatacaagaatgacagcaaactttgtattcaaaactatgaaagtaagaaataggtggaccaacatttttaaagtgctacaagaaaatatttcaaactagaatctttcaacctgaaaaggaaaacattttcctgcaataaaggtgccattaaaaatgtctcacaatttattacatgaagcattgttctacaataaatgttaagctcttgaagcaaagattaatgataccatttagtaacttgaaattcaaaaaagtggaagtatcccaagaggcaaatacgtgtgcaattattaaatgtttcatatcaacacccaaccttatgctgtctacataagctgcacttcaaatactaatccacaagatgtaaatattgaaagaatgacattacattgtcatgataatgcccagtgcaaaatatgcttctagtcagttgtatacatagaataggtaaatgtttgtaataaaaagtattcctcaatagaagtttcttaactcaaagaatgaaatatttcaccatgcacatacaaagaagagatatatggagatatgaagaggagtacttcataatgacaaagaggcaaattcataaataagacataataatcctaaatgcctacacacctaaagctggaacctcaaaacacattaaattaaaggcataattcaaaacataatcaatcacatccaaattgcagctagagatagcaacattcacctcacttccagaacaagtacacagaaaattattaagcatatgaaagacttgaaaaacatttgtgtaggcggcgggtgcataaggttgggtgttgatatgaaacatttaataatttcaataatcctagcactttgggaggccaaaatgggaggatcacttgaggccaggagtttgagaccagcctgggcaccatagtgagaccccgtctctattttttttaaataaagaaaaacatttgaatgatttttttcttaactgacatttagaaaacatccacctcaaatcttcctaatccacaaacttgtctagcacccctggaacattcaccaaaataaatttttaaatgctgaatcataggtaatatgatagatgaaacagttgaattaaattataaatgtacaacaaggaaatgctggggaaattatcaaatattttaaaattaataaacacacatagcaataaacaatgagtggaagaaaaacatttcaaagaaaggtggaaaatattttgtatcaattaaaaatgaaaacacatctcggcaaatgactggggatacagatagaacagtgttaaaggaaaataagcctcaaatgtctgtgttagaaaagaaggaagagctgagtaaataggtaactttcgcttgcagaaatactacacatcagcaaattaattccaaagtaacgtcgaggaaaaacataaaatggcaagcaaatatatacgtgcatatgtacgtatattcataaatgacaaacaggacagaaaaatcagtgacatcaattttgttccttagaagaaacaggaaaattgaccccaaaaaactttccaggccacatttggtcatgatggaaatattttggcacttcctggttaagctcaacaccaacttgcacccaaaaccaataatttcattcctaggtaaatatgtctaattaattcagcatatgtatgcaagggatcacacagaaacacgattatcaaggcccgagttataaaagagaaaatccggaaacaacacaaatgtccatgataaaaagagtggataattacatgttgataaagttatgtatggactattaaactgcaatccaaaagaataaaatagaactataaaattcaatatgtatatggtgtcatagaaacacaaatgtgagaaaaagaaagaaaaatacaaaatttatattttttaaaatttgaaacaactatatatgtgagtgcttagggtgtgtgtgtgtgtgtgtgtgtataaccatatgtatataaacgcacacatacgcacacatatagaatgtcccggccaggcatggtggctcacacctgtaatctcagcactttgggaggctgaagtagacagatcacttgaggttaggagttcaagaccagcctggccaacatggagaaacctcctctctactaaaagtacaaaaattaggtgggcgtgatggtgggtgcctgtaaatccagctacttaggaggctgaggcacgagaattgcgtgaacctgggaggtggaggctgcaatgagccgaggtctcaccactgcattccaaactgggtgacgaagtgagattgcgtctcaaaaaaaaaaaaagttctaaaagttgtgacttgggtgtggcagattgtgacatactgccagctgctagaaatgctggggcaggaggattgcttgaactctgaagtcaaagaacagcctggggaaaatagcacatgaagaagagtttgaatctcagataaaaacaacaaaaatacatcaaaagtctttaatgtaagccaagcattcagtcatctcctgtatgagagattggatctgagacgtgttttgagttggttatagtgaaggatgcaaggtgtcaattctagttggaacaatttccaggaagccatgttccgctcttgaccaaacagccactgggcctcatgcaaggtagaaatagcctgcatacgtcatcctcccatgatgtggtcagcatgtaaactgcatgagcccctcacaacatcctgtgtgctgctgaactgagctggggcgcagccgcctgtctgcaccggcagcaccatgtcgctcatggtcgtcagcatggcgtgtgttggtgagtcctggaagggaatcgagggagggagcgctggggtggagatctgggcctggagtggagatctgggcctggagtggagatatgggcctggagtggagatataggcctggagtggagatatgggcctggggtggagatatgggcctggagtggagatatgggcctggaactgtagatatgggcctgaagtagagatatgggcctggagtagagatatgggcctggaactgtagatatgggcctggagtggagatattggcttggagtgcagatatggacctggaattgagatacgggcctggaggtggagatatgggcctagagtggagatatgggcctggaggtggagatatgggcctggaactgtagatatgggcctggagtagagatacgggcctggagtggagatgttggcttggagtgcagatatgggcctggaatggagacacgggcctggaggtggagatacaggcctggaggtggagatatgggcctggagtgtagatatgggcctggagtagagatataggacggaggtggagatataggcctggagtggagatatgggcctggagtagagatataggacggaggtggagatataggcctggagtggagatatgggcctagaggtggagatatgggcctggagtggagatatgggcctggaggtgatgtacagatggatcatccatcatgatctttctttccagggttcttcttgctggaggggccctggccacatgtgggtgagtccttcccccaaaccttaggttgtcatctccccacataagatgatgctcctgaaacgggaggcaggcgacacagggggttgactgatgggctgaccatgggaagccatgtgggaatctctcatgaactaggaaaaggaagccaggggaagcttcgccacagttctgtcctagccctccccggcctttctttcccttggctgagtctgtggggacccagggggagactgaagtgctcaaaggagtggtgtgcagggaggaagtggtgtcaccggcagaggaagggagagaagcagtgcaaggaacaacaggcctctgaggacaagagcataactcacaccctccagcgtttccatgacggtaggggctgcaatgtggctgctgtcattctacctaagaggtgggggaaccacagtcatgaccctgacattccagatcttctaataggggctcagttgtttattatggttcatgcattagctgatcatgccctccatcctgtgtctaccttgtgttcttttatgtaagtaattttgcagtgttaaaatctagtaagagtcgcttcttcagcacctgctcaaagttctcagctgacacttgctgtagggagacgccatgtctatgcgggatgggtccttcctgtagccctgggcacccaggtgtggtaggagccttagaaacgtggaaatgggagaatcttctgagcacagggagggaggggcggctccacatcctcctctctaaggtggtgcctccttctcccccaggtggtcaggacaagcccttcctctctgcctggcccggcactgtggtgtctgaaggacaacatgtgactcttcagtgtcgctctcgtcttgggtttaatgaattcagtctgtccaaagaagacgggatgcctgtccctgagctctacaacagaatattccggaacagctttctcatgggccctgtgaccccagcacatgcagggacctacagatgttgcagttcacacccacactcccccactgggtggtcggcacccagcaaccctgtggtgatcatggtcacaggtcagaggctttctgtctgggcttctcactgtcccacctcctgaatcccagagcttctggtgggggcgtccatcagggtccaatcatccaggccccgactgtatttggggtaaagggggattcagtacagagaaatagttgctgtggtgggaagaataattgtccccagtgatggctacatggtaatccatgaaccctgtgactatttatgttatagggcaggggactgaagaggaagatggagctcaggttgttgatgagttgaccttgcgatggggagacagcctggactgtcctgctgtgctcagagtaatcacaagggtcctcatgagaggaggaggaagaggaaagtggggttagagcaacgtcgtgggagggagactccatcagccacagcgggctttgaagatgggggaaggccatgagccacaaaggcaggtggcctctaagggctggagaagtcaagggaactgattcttccctgagtctccagaggaaacacagccctgcagatgccttgattttagcccagagagaactgggtccgatttctgttctccagaagtggaagaggtcattgtattctctcctgccccatgtttgtgacaattttctccagcagcaacaggaaaccaacacaggaacccaggtgaagcacaggttaagaaaccaaacaaggagaaggttggctacactgattttagcatgggtgggatactgatgctaccaccaggctcgatccacatagggaggggttgatgctcctggaaccagcaccaggggccaccctatggaagctggggccatggagaaggcacagacatgaaaggagaggctcccaatccccatcaggaacagggacactgatgcctgccttactgatgagttcgtacctcctgccggcctttccaatctgtccaaaagagattgattcaggctgctaagagcctggacatgcagcctgtcatggttcctcttccacccccacataaacaccaggaaagagattagtgggaaacagatacaacagcctaagaggtgacactgagcacagtgggaagggaatcagggctactagagacagagagacagggaagagggagggagacagatggagggacctgcaacaggggttatgggcacaaaagaacacggagacacagacaggaaggagagagatagacaccatggaggggaagcctcacttatttcaggtcccatgaatgggatgagaaagggagacgccttctgaactcacaacctctcttcttaggagtccacagaaaaccttccctcctggcccacccaggtcccctggtgaaatcaggagagacggtcatcctgcaatgttggtcagatgtcaggtttgagcgcttccttctgcacagagaggggatcactgaggaccccttgcgcctcgttggacagctccacgatgcgggttcccaggtcaactattccatgggtcccatgacacctgcccttgcagggacctacagatgctttggttctgtcactcacttaccctatgagttgtcggctcccagtgaccctctggacatcgtggtcgtaggtgagagaatacagacctgcctctcacccttgctgggagatggagtgaatgatctaggactggaagccccaggtggtcatgaggaagatgagtgtggggttcctatggagagaaagtgacttggtgaggtctgtaccaacaaaggcagagaaacaggagacacaagtacagacctcatgtcataacatagaagccagacacaggggccatacaaggtgttagaaaaagagataaagaggtaaagaagacacagagagacagacatatcccagagagaggtgtccttctatgctgactttgttcagagaccaggcacaggttagaaggttccattctgttttacctctacaaagtgttctctcccaggagaacccaaagagacacatctatctggcctgagttgggccatgtggccccaggctggtggcacctacagatgttgtgtttattcttaaacctctgccttccgtgcagtggagctgtcatcgtcccaggacaccatggccccaggtgagggagcagaacaccaacccctgtatgctgtgagttcctggagtccccatactggattctgaggctcatattcaaatagcaccacatgttataggattactgagaacaaaagcccacagagagacacggagtgaaatcagggaaatcaaaaagcaaagacatgaacacacacacagaatgagccagaagaagggaattgagagactcacagacacataaagagatagaaaaagagggcagagaagtggagcgtatgatggaaggaagcagagaaaagccctaaaatcagagccctgagggaggggcacaaagacagggaaagataaagatgtgaggatggattgcagagactccaaaagggaactagagagactgagaggcagagaaagacaaggagatggagagagacagatgatagatggacagatagatatagatagatgaaagataaaaggtagatgatagataatagagagacaggtgatagacaaatagatgatgaatgactgatagatgatatagatagacaagtagaaagacagacagatgatatataaatagatatagagagatagaaagacagataaacacatgatgatagatggatagatgcatacatacatacattgattgatagatgatagataacagagagataggtcatagatacacagatgatgatagatgatagatacatacatagataaatgatagatcgatcaatagataatagatagaaatatgcagaaagttatgagcaagacagaaagtgagagactcagaattaaagaaagaggaagatcaagtcaaccagtccaaggagggtcagagagaataaaatggtacaaaaaaagaaaacatagctagggatggagaagtgaggtcagagacctagagagacagagaaggtggaaggaggaaatagacatgaagagagatgggggtggagggtgagagagagaaagagagcattaagtcatagagcaggggagtgagttctcagctcaggtgtgaggagagctgtgacaaggaagaacctccctgaggaaaccacctcttcttcttccaggtctatatgggaaaccttctctctcagcccagccgggccccacggttcaggcaggagagaatgtgaccttgtcctgcagctcccggagcttgtttgacatttaccatctatccagggaggcggaggccggtgaacttaggctcactgcagtgctgagggtcaatggaacattccaggccaacttccctctgggccctgtgacccacggagggaactacagatgcttcggctctttccgtgccctgccccatgcgtggtcagacccgagtgacccactgcccgtttctgtcacaggtgagaaaacaccatgcctgtcccatgtcttgtgatcctagagccatagctgaggagcttcctgctgatgatggagagaagcatggacagatgccgagacagaacacacagcatgggtgtaagggcggggtcagggcgcaggatggcagacagggcacctccaaaccctcctgtatggcctgcaaggatgcccttgatcagggttccaggcacccaggcagatggagaaagaggtcagaacagacccagaggagggagactgggctctgcctggggagatcagaggttctctcagcccctcaaccttacccacttcccagaagcccatcctggcctgtcacccacagagagatgtcatcaccagcaacgcctacacccttttctttttgtttgaagaaatatttattgaggtgaaatatacctatgtaatttaccacctttaccatttttaagtgtgaagtctactgttcataaatacatttataggctgggcacggtggctcacggttgtaatcccaacactttgagaggccaaggcaggtggatcatttgagatcaggggctcaagaccaccctggccaacatggggaaaatccatctgtactaaaaatacaaaataataattataatgataataattagccgagcatggtggcacatgcctgtagtcccagctacttggtagggttgggcaggagttgcacttaattgcaggaggcggaggttgcagtgagctgagatcatgccactgcactgcagcctgggcaacagagagagacactctctcaaaattaattaattaattaattagtattcttttttttttaccctccacccttcccttcctggcctctggtagccaccattctactctctacctttgtgagatccaccttttagctcctgcatatgagtgagaaatggaaatacttgtaatgacctccagttccattcatgtggctgtaaatgacaggatgttactctttctatggatgagttgtccctattgtgtgtgtgtaccacattctctccatccattcacccactgatgggcaggtaggttgatccacatcttggctactgtgaacactgctggaacagtcatgggagtgcagatgtcacttcgatacgctgatgtcctttcctttgggtttacacccagtcatggaattgctagatcctctggaagtgtctttttacattttgttttatggtttttgtttttgtttttgttttttttagactgtttcactcttgttgcccaggctggagtgcagtggcgccatctgggctcactgcaacctccacctccaggattcaagagattccccagcctcagcctcccaagtagctgggttactggctcccaccaccacactcggctaatttttatatttttagtagagacagagtttcgctatattggccaggctgctcttcaactcctgacctcaagtgacctacccacctcggcctcccaatgtgctgggattacaggcatgaaccactgtgcccgacctcattttattttttgaggaacttccatactcttctcctctgtaatggctgtactaatttacattcgtatcagcagtgtaccagatgcaaccctggttgactcagcagagcaagagacgtgcagtaagagagaatttagcttatttatgcacacgacacttccactcactcactcgttcagccaatgccccatgctcaggctgtgcagtgtggaatcttttcctattgttgccataacaaatttccacaagcttcgtggatgaaaacatgtttttcttaattatctcacagtgctgtaactcagaagtatgaactgcatttcactgggctgatatcaaagggacagtaaggctggatttctttttaaggttccaagcaagaatctgctccttaacgtttcccagctcctagaggctcccacgttcctgggcccctggtccccttcctccttcctccttcctcaaagcccacaaaggctggtcacgtctcacatggcatcattcagactcttcttctttacccacacctttttctctgaatcctgctctgccttcttcctcatcttttaaggactttgggattctattggggtcaccaagataatccatctcaatctccctaaaatcatccagcgtaccctctttttaagttcagctgattagcaaccgtaatgccatctgcaatcttcattcctcctttcctgtaaaataacatattcacaagctatggaggctaagacagggacattttgggggtggggcagcattctcctgccttccacaaatggtaaacaggatgcatttggcctctgctcttgggacgctgatattgcagatgggtaaatgcgagggcagagaatgaatgcacaagggtaccaataaatgaatgatccattgggaagcatctgtgcaccaaatctggggttttttgtgtgtgtgtgtgttttttgttttctttttttttttgagtagagtctctctctgttccacaggctggagtgcagtagcacaatctcagctcattgcaacctctgcctcctgggttcatgcaattctcctgcctcagcctaccgagtagctgggattacagctgtgcgccaccacactcggctaatttttttggtatatttttttagtagaaatgaggtttcaccatgttgtgcaggctgtctcaaactcccaatctcaagtgatcccaccgccttagcgtccctaagtgcaaagattacaggcgagagctactgcgcccagccaggatttaaaataagtaatagataatgctgagtatataatttcaggtgacagagaaggtctcactgatcagataatatttgtgaccttaatggaaaaaatggattcaacccttggaagattggcggaaggattttccacactgagctctcagccgtgaaggcacaaaggtggaaacattcttagttcaaggaagaggctctgcctcaaatgctgggaatgagatggggagaatgacaagacaactgtagagagatggagagcacactgggtacacaggaaactaaggaggaacaaggagcatgtttttgatactcacagcccttggattcaactcagagctaactaggaatccctacctgattaacagtgaccgacatgaaaataagggaggcccaggtgcgtaactggaatctaggagaccgtggaaaaggcaattcccgccccactggtgaaacgtagggttgatttacacactaaatgaatgaaagatggatataagctatgcttgtgaggtagaatcatttgcagggagggcttgctgggtttgatttttcctagtagtttaatccttgtttcattaatttctttctgagatgtgttttttttctacatctaaatcaatacctggcagaggagcgatagacacatgaggggtggtgcaaatgaagggacctagtataatataatatacaagactgtggatgggggctcacacctgtaacccaacactttgggaggccaaggcgggtagatcacttaagggtaggagtttgagaccagcctggccaacatggtgaaaccccgtctgtactaaaaatacaaaaattagcctggtgcattggcacctgcctgtaatcccagcgactggggaggctgaagcagaagaatggcttcaaccctggaggcagaggttgaactgagatcgcatcactgcactccagcctgacacagggggactctgtctcaaaaaataaaaataaaacatacataattatgacacacagaaattacaaaggcaactggataccaaccatcatttttctatttctctgtgtttaattctttgaccctttatcttatccattaaacaatcaggttaaacctcttccttatttggctttctgtgagcttgggatcatatggaaaatgtgaaagcctcctgaacccaccagcacaggtcctggaatagagaacgtgctctgttcatggcataaaacttgccccttcacccaaatcccccaattcatctctacttccaatcacctatggagatacagatagatcatggggaggtaaacactaatactctttggagtgagctcagatcttggactcagagaccagtgccagcactagcccctggtcacatttcgtactaactcacagaaggacaggctgtattgaaacaataaacgacggagagggcggtccttccccgtgcttctcgggtggaatagcagcctaatatatgtctcagcagatcacaaaaagtagcatgttgttcctgggctacatcattatttcatggctgtttgatttaagtcagttctacttcactttttttatcttgatttcattttttctttcttttcttggagaatgtaatttttttgagtcaagagggttgtggtggtagaaactgtaaagcacattcgctgtgtatcaatcccaatccagtcttcccagagaagattctaaacacctcctggaatgcacctgggcctataccaattcctatcactcaccgtcactccagggagacagaacacacagagaacacattacacaggcaggttcattactaacagataagcagcgagtgacaacagaaacctacatttcaatgtgagccagtccctcaaggctcagaaaagctgctcgagacatgtggagtcaccccatatgcagtgtatctgggggaaatcaaaaagcagcccagcctgggttttgtaccctggagccacaggaagcactcagctaaagcactgcatgacgtcctcctccaggaagaacaggaagacagcccaggctgttctgggatgttcctcctgatctcaggacgttgctgtcttagtccatttttgttgctctaaaggaacacttgagcctgggtaacttctaaagacaagaaatgtgtttgcctcacagttctgcaggctgtactggaagcatggcaccagcatctatttcttgtgacggcctcaggctgctcccactctggcagaagggaaggagggtctgtctgtgcagagaccacagagatcacacggcaagagagggaccaagggggagggggagcgatggagcttccaagctcttttaacaaccagttctccaggaactaatagagggggaacttgctaaccccgtctccttggaacagcattgatctgttcatgatggatccacctccatgacccaaacaactcccaagaggcccaacctcccactctgggggttacatttcaatgtgaggtttgaaggggtcaaacatctaaactaaagcagttgtatcctcagcacgttctatggttactacaactgagaaagcaggaggaagctaggtctcccgccatctgggtgcttgtcctaaagagacgttgtatgtggttacctgtcaatcaagaaatgtgagacaattcatatagaggaactgctatgattagcttcttattggtgtcttgtcttcctccaggtaactccagaaacctgcacgttctgattgggacctcagtggtcatcatcccctttgctatcctcctcttctttctccttcatcgctggtgtgccaacaaaaagagtaagtctcacgaagcagaagccagagagctcagggccatgtggggaagcaggatgggagcactcaggtgtgtgttcctcacagactggatggtccctggcccaaggcaggagccacagaggcaggactttctagagagagcaccagactccctgcctctgccttcagctcacagaccattgcctgattctgaaccgtatcctcacatcccctgcagccactcacatccaggagaaggttccatgacaggcagaaagtgggacacagaatcaataggatgggaactcagagctatacatgggatggatccttgagctcagagagatagaatgtctgagtctgctgttggcaactgagggacctcaggcacctatggcctccccctgtatgttggtatctgcttatgaaatgaggacccagaagtgccctccgagctgttttgacgacttccgtcttctacagatgctgttgtaatggaccaagagcctgcagggaacagaacagtgaacagggaggtaggtgctcctccgcccagcctcgtggctagtcttattcccaaagagtcctggaaaatgtgagcaccctccctcactcagcatttccctccctccaggactctgatgaacaagaccctcaggaggtgacatacgcacagttgaatcactgcgttttcacacagagaaaaatcactcgcccttctcagaggcccaagacacccccaacagataccagcgtgtaacacggaacttccaaatgctgagcgcagatccaaagttgtcttctgtccactagcaccacagtcaggccttgatgggatcttctagggagacaatagccctgtctcaaaaccgggttgccagctcccatgtaccagcagctggactctgaaggcgtgagtctgcatcttagggcatcgctcttcctcacaccacgaatctgaacatgcctctctcttgcttacaaatgtctaaggtccccactgcctgctggagagaaaacacacttgcttagcccacaattctccatttcacttgacccctgcccacctctccaacctaactggcttacttcctagtctacttgaggctgcgatcacactgaggaactcacaattccaaacatataagaggctccctcttaacacggcacttagatacgtgctattccacctttcctcagagtatctttcagccttctgtcagcagtaaaacttataaattttttttataatttcaatgtagttttctattcttcaagtaaacatgtctgccctcatggtttcttcaatgggactcttttcttgcctaaggcttccggtgttatcattaccacgtccacataaccccatctgttctccgctgggttctcagccctggactctgagcttctggaagcatggtggagcctgaattgtctctgagactccaatttccatccaaagatgcagcacataggaggttccaaggatggtgaatcagatgaacaagtgatattcttactctctgcagatctggaaagctggcagagtcattccacgatgaaacatttgtagagtcataggccttgttagtctcatctccacagggacacgtatcaacacatcatctttcatactactataaatagacagtcactcctccatatctctggggtttacacatgtttattgaatcagcaataaatcaaaaatattttgagaaaaaaaatccccgaagtttcaaaaagcaaaaaactatgttgaatcgacacaaattgagtggcgtgtaggctgtgtcaggaattataagtaatcaagagatgatttcatgtatacaggaggatgtgcatgggttctatgcaattgctatgctattttttttttttttttgagacagtctcactctctcacccaggctggagtgcagtggcgtgatctcaactcactgcaacctccgccttccaggttcaagcgattctcttccctcagcctccccagtagcctcccctaggattacaggcacgtgccaccatgcacagataaatttttttgtgtgtatatttttagtagagatggggtttcagaa[136 bp omitted]gattttggtatctgaatggggatcctggaaccaatcacccaggtatagtgaaggaccatggtatataatttttatttgtcaatcttaaaaataaagcataaaaaatttacaacaacaagataaaaaataagaagtgtttttatagtgtgaggataagtttagatttattttttcctacgtgtaaccctatggtcctgtgttatttgttgagaaaatattctattccaccttaaactacatggcagcctttgtcaactataaagggactgtgtatccacagatgtattttagacacagttttctgtccagtggttctctgtatcccctctcatgaggatgctgcattttatataaacttatagaaccccttaaaatttggtaacctgagtcctctgatttgttattataggttatttagtttgctttttttttttttcttgagacagactcttcctctgtcacccaagctggagttcagtggcttgagctcagctcactgcaacctccgtctcccaggttcaagctattctgatgcctctggtttagtagtagaaactcaagcaggaaaattagaatggcttcttgtcacaattactctgataatgttaataatacctgttagacattttgcacattacatatgaagaagagtttgaatctcagataaaaacaaaaatacatcaaaaatctttaatgtaagcacagaattcaatcatctcgtgtatgagaggttggatctgagacgtcttttgagtctggtcgtagtgaaggacgcaaggtgtcaattctagtgagaacaatttccaggaagccatgttccgctcttgagcgagcacccactgggcctcatgcaaggtagaaagagcctgcgtacgtcaccctcccatgatgtggtcaacatgtaaactgcatgggcagggcgccaaataacatcctgtgcgctgctgagctgagctggggcgcggccgcctgtctgcacagacagcaccatgtcgctcatggtcgtcagcatggtgtgtgttggtgagtcctggaagggcatcgagggagggagtgcggggatggagatcggggcccagagttggagatataggcctggaagtggagttatgggcctagagatggagtgatgggcctagaagtggagatctgggcctggagtggagatctgggcctggagtggagatatgggcctggaggttgagatatgggcctgcagtagagatatgggcttgtagtggagacatgggcctggagatggagatatgggcctggagatggagatatgggcctgcagtagagataggggcctggagtggagatatgggcctggagtggagatatgggcctggagtggagatatgggcctggaggtggagatatgggcctggaggtggagatatgggcctggagtggagatatgggtctggaggtggagatacgggcctgcagtagagatatgggcctggagtggagatatgggccaggagtggagttatgggcctagaggtggatatctgggcctggagtggagatatgggcctaggaaggagatatgggcctgggtgtggagatatgggactggagaggtgatatgggcctggagtggagatatgggcttagggtggagatctgggcctggggcggagatatgggactggattggagataggggcctagggtggagatctgagcctggattggcgatatgggcctagggtggaaatatcagcctggagtggagatatgggcttggggtggggatatgggcctggaaactgggtctctgcacagccgacagccctgttcttgggtgcaggtaggcactgagggtgagtttaacttcagcccaggaagggcctggctgccaagactcacagcccagtgggggcagcaagggaggcctggtttgcctgcagatggatggtccatcatgatctttctttccagggttcttcttgctgcagggggcctggccacatgagggtgagtccttctccaaaccttcgggtgtcatctccccacataagaggattttcctgaaacaggagggaagtcctgtcggggagtctctcataaactaggaagagaggaccctggggtgctcagcccacatttctgacctcgcctccctggcctctcaaccccttggcagagtcaagttctgtggggaccagggttagactggggtgctcaaagctggggtgtgtggttgggaagtggtaggaacagcagatcctctgaggacaaaggtgttactcacacacttcagcgtttccatgatggtaggggctgcagtgtggctgctgtcattctaccagaagaggtgggaaaccacagccatggccctgacattccaaatcctctgatgggggctcagttgtttattttcgttcaggcatccgctgatatccattcacaaaggacatgccctccacctcatgtctaccctgtgttgttttatgtgagtaatcttacagtattaaaatctagtaggagtctctttactcagcacttgctcaaagttctcagctgaggcttttgttgtagggagacaccatgtctttgcgggatgggtccttccttcagccctgggcaccaaggtgtgatagtagccatagaaacgtggaaagcgaggagaatcttctgagcacagggagggaagggcagttccacatcctcctctctaaggcggcgcctccttctccccaaggtggtcaggacaagcccttgctgtctgcctggcccagccttgtggtgcctctaggacatgtcattcttcggtgtcactcttatcttgggtttaacaacttcagtctgtaaaaggaaggtggggtgcctgtccctgagctctacaacagaatattctggaacagccttttcatgggccctgtgacccccgcacacacagggacatacagatgtcggggttcacacacacactcccccagtgggtggtcagcacccagcaaccccctggtgatcgtggtcataggtcagagggctcctgtcttggattctccttgtcccacctcctgaatcccagagcttctgttgggcatgtccttgagggtcccatcacgcaggccctgactgtatttgtggtaaagggggattgaatacagggaaatgggtgctgtggtgggaagaataattgtccccagtgatgactacattctaatccctggagtctgtgactatttatgttataggggaagggactgaaggggaagatggagctcatggggagacagcctggactgtcccactgggctcagtgtaatcacaagggtgcacatgaaaggaggaggaagaggggagtggggattagagcagtccagtggaagtcttcaccagctttgaaggtggaggaaggccaagatccatgaatgcaggtggcctatagaggctggaaaagtcaaggaactgattctccagagtctccagagggaacaaagccctgcagatgccttgattttagcccaggaaaaatagggtccaatttctgtctccagtactggaaggtgtcagtgtggtctctcctgctgccatgcttctgataattttctacagcagcaacaggaaaccaacactggaacccaggtcaaggacaagttaagaaacaacccaaggaaagccaggcatggtggcaggtgcatgtaatcctagcgactcaggaggctgagggcaggagaatcacttgaacccaggagacagaggttgcagtgagcctagaccacaccacttcactccagcctgggtgaaggagtgagactctgtctccataattaattaattaattaaagaaaccaaacaaggagaaggttggctaccctgagatcagcaagggtgggatgatgatgccaccaccaggctccatccacatagggaggggttgatactcctccaaccagcaccaggagccagcctatggaagctggcaccatggagaaggcacaggcatggcaagagtggctcccagtccccaccaggaacagggtgtgtggacactggtgcctgccttattcatcagttcataccttctgccaaggattgcaattcatccaaaagagattgaaccaggctgataagagcctggatgtgcagcctatcctggttcctctttcacccccacataaacagcaggaaatacattagtgtgaaatagatacaacaccccaagagatgaggctcagcccagtgggaagggaatcagaggctactagagacagagggacagagaagagggagggagacagatggaaggacctgcaccaggagttaagggcacagaaaagaacatgaagacacagagaggaaggagagagacagacaccagcaaggggaagcctcactcattctaggtgccatggatgggatgataaagagagacaccttctaaactcacaacctctcttcctaggagtccacagaaaaccttccctcctggcccacccaggtcccctggtgaaatcagaagagacagtcatcctgcaatgttggtcagatgtcaggtttcagcacttccttctgcacagagaagggaagtttaaggacactttgcacctcattggagagcaccatgatggggtctccaaggccaacttctccatcggtcccatgatgcaagaccttgcagggacctacagatgctacggttctgttactcactccccctatcagttgtcagctcccagtgaccctctggacatcgtcatcacaggtgagagtgtccggacattctcattgtcattgggatgcagagtgaatgatccacgacttggaacccccaggtagttgtaaggaagatgagcttggtattcttatggagagagactgacttgctgaggtttgtaccaacagagacagagaaacaggagacacaagtacagaccaggtgtcataacagaggacagacacaggggccatacagggagttagaaaagacagaaagagttaaaagagacagacagacagacatgtcccagagagaggtgtccctccatgctgactttgctcacagacctggcacaggttagaagtttcatttctgttttacctccacaaagtgttctctaccaggagaacccaaggacacccatatttatgacctgagttgggccctgtggcctcaggccttgtggcacctacaggccatgtttattctgacacctctgccttccatgtaatggagagtaatcgtcccaggatatcatggccccagaacaccaacccctgtatgctgtgtgaacttgtggtctccagactggattctgtggctcacattccaaataaccccacatatgaaaggatcactgagaggcacagagaaaaatcaggaacaccaaaaagcaaagacataaacacacagagaatgagccagaggaaggagattgagagactcacagacacataaagagagagaaaagagggcagaggagtggtgagaatgatggcagggagcagagaaaagcactaaaattagagtcctgagagagaggcacaaggacatagaaacatggagatgtggggatgaattgcagagattccaaagagaactagagagaccgagaggcagagcaagacagatgatagatggatagatatagatagatgataaataggtagatgatagataataggttaaagatacatagatgatgattgattgattcattaatagataatacatagagatgatgatgatgaagacagataatacgtacagatagagaggcagacagaaatcatagagagagagatgatacatacatataaataacagatgattgatggatagatagacaagtgatagatacatagatgatatatagatatagatgacaggtagagaatttgtagataggcaccgaatagataaatagatagatcgacagataatagatagaaatatgcagaaagttatgaacaggacacaacgtgagaaacttagaatttaaaaaagtaacatcaagtcaaccaatccaaggagagtcagagagaataaaagaatccaaaaagggaaaacatatctagaggtggggaagcgaggtcagagacctagagagacagagaaggtggaagaaggaaatagacatgaagagagatggggtggagggtgagagagagagagagagagagcattaggtcatagagcaggggagtgagttctcagctcaggtgaagggagctgtgacaaggaagatcctccgtaaggaaaatgcctcttctcctccaggtctatatgagaaaccttctctctcagcccagccgggccccacggttctggcaggagagagcgtgaccttgtcctgcagctcccggagctcctatgacatgtaccatctatccagggagggggaggcccatgaacgtaggttctctgcagggcccaaggtcaacggaacattccaggccgactttcctctgggccctgccacccacggaggaacctacagatgcttcggctctttccgtgactctccatacgagtggtcaaactcgagtgacccactgcttgtttctgtcacaggtgaggaaaccccatatctgtctcatgtcctatgatcctagagccttagctgaggagcttcctgctgatgatggagagaagcatggacagatgcagagagaagacgaagcttgggtgtgagggagggatcagggcacaggatggcagacagggcacctccaaaccctcctacacggcctgcatgaaggcccgcggccagggctccaggcacacaggcagatggagaaaacggtcaggagagacccagaggagagagactgggctcagtttgggaagatcagaggttccctcagcccctcaacattacccatttcccagaagcccatcctggcctctcacccacacagggatgtcatcaccagcaacccctacaccctttacttttgtttgaagaaatatttattgaggataaatatacctatatagcttaccacctttaacattttttttttttttgaggcagagtctagctctgtcccctatgctggagtgcagtggcacaatctcagctcactgcaacttccgcctcctgggttcaagtgattctcctgcttcagccacctgagtagctggtgctacaggcgcgcaccaccacgccaggctactttttgtatttttagtagagagggggtttcaccatgttggtcgagctggtctccaactcctgaccacgtgatccacccgcatctgcctcccaaagtgctgggattacaggcatgagccaccacgcccagccacatttaccatttttaagtgtaaagtctagtggtcataaatacatttatatatatatatatatatatatatatacacacacacacacatatataaacatatatatatatatatatatatatatatatatatttttttttttttttttttttttaccctccacccttttattcctggcctctggaagccaccattctactctctaccttcatgagatccaccttttagctctgtatatgggtgagaaatgggaatctttgtaatgacttccagttccatccatgtggctgcaaatatcaggatgttattctttctatggatgagtagtctccactgtgcgtatgtactacattctctctatccattcatccactgatgggcaggtaggttgactccacatcttggctactgtgaacagtgctgcaccaatcatacgagtgcagatatcacttcgatatattgatttactttcctttggatataaacccagtagtgaaattgctggatactatgaaagttctctttttagttattcgtttgttgttttgtttttgtttttgagacagtttccctctgtgcccaggctggagtacaagtgaagtcatcttggctcattgcaacctccgcctcctgggttcaaatgattttcctgcctcagcctccctagtagctgggattacaggtgcacgccaccatgcctggctactttttgttttttttagtatagatggggtttccccatgttggctgggctgctctcaaactcatgacctcaactgaggtgcccgcctcggtctcccaaagtgccgggattacaggcatgatccacctcacccaacctctttttagttctttaaaggacttccacacttttctccgtaaaggctgtactaatttacactcctaccaacagggtattagggttctcctttctctaccactttggcaggatttcctttgcctgtcttgcagctaaaagccattttattttatttcattttattttgagatggagtttcgctcttgtcacccaggctggagtgcagtggtgcgatctcggctcaccacaacctccacctcccaggttcaagcgattctcctgcctcagcctcccgagtagctggaattacaggcacacgccaccacgcccaactaaattttgtatttttagtagagacagtgtttcttcatgtgggtcagactggtctcaaactcccgaccttatgaggttcacccacctcaggctctcaaaggtctaggatgacagacgtgagccaccacgcccggcctaaaatccattttaatggggtgagatgaaaactcactttgattttaatttgtgtttctctgatgatgagtgaaactgagcactttttagtatgtggggaaatttcatgtgttttgctcctttttcaattaaatcgtttgttttattgagttgtttgagcttcttatatttctagttattaatcccatctcagatgcatagtttgcacatatttgctcccaatctgtgggttgtctcttcactttgttggtttatttttagcggtgcagaagttgcttagtttgaggtaatcccaatggtctatttttgcttcgattacttgtgttttgaaggtttaaaacaaaatgtcttccttcagacaaatgtcctggagcatttccccaatattttcttctacgtgtttcataggttcaggccttagactcacatctttaatccattttcatttgagttttgtgtatagtgacaggtagaggtgcagtttcattcctctgcatgtagatgtccaggtttccctgcactgtttattgaaaagactgtcctttcctgattgtgagttcttggcacctttgtcaaagtccattggatgggctgggcatggtggctgacacctgcaatttcagcactttgggagcccaaggcgggtggatcacctgaggccaggagttcaagattagtctggccgacgtgatgaaacattgtctccactaaaaatataaaaattagctgagcatggtggtcagcacctgtaataccactactcaggagtttgaggccagagaattgattgaacccaggaggctgtggtggcagtgaaccgagattgcacctctgcactccagcctgggtgacagagcgagactccatctcaaaagaaaaaagaaaaaaacattggaggtaaatgcatggattatatctgtgttcttcattctgctccattgttctacgtgcctttctttatgccaatgtgatgctgttttgcttactacagctctgtaacatattttgagatcaggtagtgtgatgctcctgttttctctttataccttgaagtctcaagacagtgggcgtcacatacaaaaattacggaaaaaaggatcccaggactcccagggcccaatattagataacagagtgttggccatgaaccaacctcaaagatttccattgagtagaggacagacaccctcatttcctcacctctctcctgtctcgtgttctaggaaacccttcaaatagttggccttcacccactgaaccaagctccgaaaccggtgagtacagaaccctcttatatccgcttttggaaacctggggaggtagaaaccttcgatgcaggcattgactcagcatctcgcagctctgacattgtacgcctgtcttctaccatctccgaactccagatactccaacagcgaaagggatctgggcccaacctagggctcagtgaaatctcttaatctctcattttatggagctgagacctcctacaagctagaagaatgattgccaatctgacatccttctcaggaaaaatgcaatgtttgttctgcctgcattcctaactggaggataaattcctgggggcttgagagagggaagggaagggaacatctgatgagggcgaggtgttttagagaagttccacttgccaaggaatgaattactgttggtcatgaagcaaccctggctgactcagcagagcaacagccttgccgtaacagagaacggagctcatgcacgcacacttcgactcactgactcattcagccacggccccatgctcaggctgtgcagtgcggaaccttttcctattgttgccataacaaatttccacaagattcgtgggtgaaaacaaaacggttttttaattatcttacagtgctgtagctcaaagtaggaagtgcatcttactgggctaaaatcaaggtgacagcaaggctgccttccctctgaggattccaggcaagaatctgcttctcacttatcccagcttctaaaggctcccagttccttggctcctgttccccttcctccttcctcaaagcccacaaagactggtcacatctcacatggcatcactcagtgccttcttccttaccacacctctttctctgaatgctgctctcccttcttccttatcttttgaaaacttggggattctattgggttcaccaagatgaaaatccctcataatctcctggaaatcatccaggatacccttgttttaagttcagctgattagcaaccgcaattccatctacaatcttcattcctcctttccatgtaaaataacatattcacaagctatggaggctaggacagggacattttggggtgggacagcattctcctgccttccacaaacggtgaacaagatgcatttggcttctgcccttgggacactgatattgcagatggttaaatgggagggcagaaaatgaatgcacaagtggatctataaatgaatgatccattgggaagcatctgtgcatgaaatctattttttgtttgttcttttgtttattgagacagagtcgccctctgtcttccaggctacagtgcagtgtcacgatcttggctcactgcaacctgcgtctcctggattcaagtgattctcctgcctccgcctctcgagtagctgggattacaggcaactgccaccgtgcccggctaattctttttgtatattttttgtagagaggatgtttcaccacgttggccaagcttgtctgaaactcccaacctcaagtgatccgaccgtctcagcatgccaaagtaatgggactacaggcgtgagccactgtgcccagccagaattcaaaatcaataatagataatgctgagtgtatgatttcaggtgacaaagaaggtctcactattcagatatttgtgacattaatgaaaaacacggattgaacccctgaaagattggcggaaggattttgcacacacagctgtcagccgtgaaggcacaaaggtgaaaacaatctgatgtggaaggaagaggctctgcctcaaatgctgggaatgatgtggggagaatgacaagacgactgtagagagacggagagcacactgggtacacaggaaactaaggagcaacaaggagtgtgtgtttgacactcacagccattggattcacctcggggtaaccaggaatccctacatgattaatatgactgacatgaaaataagggaggctcagttgcataactggaatctaggagaccgtggaaaaggcaattgccaccccactggtgaaatgtggtgctgatttagacactaaatgaatgaagtagatggatataagatatgtttgtgaggtagaatcattgactggaaacgcttactgggtttgattttcctacttgtttaatcctcgcttaattaatttctttctgagatttattcatcctacacataaatcaatacctggcaaaggagtgacagatatatgagtggtggtggaaatgaagagacttattatagcataatatacaagtctgtgaacagtggctcacgcctgtaacctagcactgcaggaggccaaggtgggtggattccatgaagtcaggagttccagaccagcctggccaacgtggtgaaaccctatctctactaaaaatacaaaaattagccgagcacgatggtgcatccctgtaatcccagctcctattctggaggatgaagcaggagaatgacttcaacccagtaggtggaggttgcagtgagtggagattgcatcactgcactccagcctgggggacacaaggagactctatctcaaaaaataaaaataagaaatacataaatataataaaacacacacgaatgacaaaggcacctgaattccaatcatcgtttttctatttctctataattacttctttgatcctttatcttatccattaggcaatgagcttaaaacctcttccctatttggctttctgtgagaatgagatcacatagaaaatgtgaaagccctcagaatcctccagcacagatcgtggaatagagaaagtgctctgttcatcgcaacaaaaaacttgcccactcacccaaatcccccacctcacccctacttccaatcacctgtggagattcagataggctatggggaggtaaacattgatactccttggagtgagtccagatcttggaatcagagatcagtgccagcactagctcctgctcccctttcctactaattcacaggaggacaggtggtattgaagcaatagatggccgagggggtggtccttcccccagcctctcgggtagaacagcagcctaacatgtgtctcccgagatcacaaagagtagcacgtttcacacgggcttcaacactatttcctggccatttgacataagagaattctacttagctttttttatcttgatttcacttttgtttccttttcttggagaatgcaagttgtttgattcaagaatgctgtggatgtagaaatcctaaagcacattcgctgtgtatcaatcccagtgcagtcttcccagagaagactctaaatacctcctggactgcacctgggcttatgccaattcctatcactcaccgtcactccagggagacagaacacacagagaatacattacacaggcaggttcattactaacagataagcagcgagtgacaacagaaacctacatttcaatgtgagccagtccctcaaggctcagaaaagctactcgggacatatggagtcaccccatttgcagtgtagctgggggaagccagagagcagcccagcctgggttttgtactgtggagccacaggaagcactcagctaaagcactgcatgacgtcctcctccaggaagaacaggaagacagcccaggctgttctgagacgttcctcctgatctcaggacgttgctgtcttagtccatttttgttgctctaaaggaacacttgagcctgggtaacttctagagaaaagagattggtttgcctcacagttctgcaggctgtactggaagcgtggcaccagcatctatttctcgtgacggcctcaggctgctcccactctggcagaagggaaggagggtctgtctgtgcagagaccacagagatcacacggcaagagagggagcaagggggagggggagcgatggagcttccaagctcttttgaacaaccagctctccaggaactaatagaaggggaacttgctaaccccgtctccttgggacagcattggtctgttcatgatggatccacctccatgacccaaacacctctcaagaggcccaacctcccacagtgggggtgaaatttcaatgtgaggtttgaaggggtcaaacatctcaactaaagtagttgtatcctcaacacgttctatggttactatgagagctataactgagaaagcaggagaaagctgggtctccctccatctgggtgcttgtcctaaaggggtgttgtatgtggttacctgtcaatcaagaaatgtgagacaattcataaagaggaactgctatgattagcttcttattggtgtctcctcttcttccaggtaaccccagacacctgcatgttctgattgggacctcagtggtcatcatcctcttcatcctcctcctcttctttctccttcatcgctggtgctgcaacaaaaaaagtaagtctcacgaagcagaggccagagagctcagggccatgtggggaagcaggatgggagcactcaggtgtgtgttcctcacagacaggatggtccctggcccaaggcagcagccacagagggaggactttctagagagagcaccagactccctgtccctgccttcagctcacagaccattgcctgattctgaactgtatcctcatgtcccctgcagccactcacatccaggagaaggttccatgacaggcagaaagtgggagacagaatcaatgggatgggaactcagagctattcatgggatgggtccttgagctcagagagatagaatgtctgagtctgctgttggcaactgagggacctcaggctcctatggtctccccctgtatgttggtatctgcttatgaaatgagggcccagaagtgccctctgagctgttttgttgacttccgtcttctacagatgctgttgtaatggaccaagagcctgcagggaacagaacagtgaacagggaggtaggtgctcctcggcccagcctcgtggctagtgttattcccaaagagtcctggaaaatgtgagcaccctccctcactcagcatttccctctctccaggactctgatgaacaagaccctcaggaggtgacatatgcacagttgaatcactgcgttttcacacagagaaaaatcactcgcccttctcagaggcccaagacacccccaacagatatcatcgtgtacacggaacttccaaatgctgagccctgatccaaagttgtctcctgcccatgagcaccacagtcaggccttgaggggatcttctagggagacaacagccctgtctcaaaactgggttgccagctccaatgtaccagcagctggaatctgaaggcgtgagtctgcatcttagggcatcgctcttcctcacaccacaaatctgaacgtgcctctcccttgcttacaaatgtctaaggtccccactgcctgctggagagaaaacacactcctttgcttagcccacaattctccatttcacttgacccctgcccacctctccaacctaactggcttacttcctagtctacttgaggctgcaatcacactgaggaactcacaattccaaacatacaagaggctccctcttaacacggcacttagacacgtgctgttccaccttccctcatgctgttccacctcccctcagactagctttcagccttctgtcagcagtaaaacttatatattttttaaaataatttcaatgtagttttccctccttcaaataaacatgtctgccctcatggtttaggtaatgggactcttttcttgcctaaggcttccggtgttatcagtaccatgtccatataatcccatctgttctccaccgggttctcacctctggactctgagcttctggaagcagtgtggagcctcatttgtctctgggactccaatttccatccaaagatgcagcacataggaggttccaaggatcgggaatcacatgaacaagtgacattgttactctctgcagacctggaaagctggcagagtcattccacgatgaaacatttgtagagtcataggccttgttagtctcatctccatggggacacatatcaacacatcatctttcatactataaatatacggtcactcctccgtatctgtggggtttacaggtctttattgaacaaagtataaatcaaaaatattcagagaaaatatccacagagttccaaaactcataactatgttgaatggacacaaatgaagctgtgtgtaggctgtatcaggaattataagtaatcaagagatgatttcatgtatacaggaggatgtgcatatgttatttgcaagcgctgtgccatttcatataagaggcttgagcatctacagattttggtatctgagtggagatctcgaaaccaatcacccacgaatagtgaaggatgaccgtatatgacttttatttctcaaatttaaatataaatcaaaaaatgtacaactagataaaaactaagaagtgtttttatagtgtgagttagatttattttttactaggtgtaacccattggtttaatattatttattgagaagacattctatgccaccttaaaccacacggcagcctttgtcaactctaaagggactgtgtgtacatggatgtattttagacagtttctgctaaggggctgtctgtgtccacacacttgatgatgctacactttatgtagccttatagaaccctttaaatttagtagccagagccctctaatttgttattataggctatttgcttttttttttcttgaggcggagtcttgctctgtcgcccaggctggactgcagtgacacaatctcagctcactgcaacctccgcctcccaggttcaagcgattctcgtgcctcagcctcttgagtagctggcgttacaggtgcctgccaccaggcatggctaatttttggatttttagcagagacacggtttcactatgttggccaggctgctctcaatcccctcatctcagttgatccgcccacctcggcttcccgacgtgctggggaaacttgattttctatagcattatgttactggatatttctgtaaaatttaaaatgagggaggcagagagacagagagagatcaaactccagagttgggactctggaatcttgggtcatgagacaaattttagattaaactacaaaactccagaatttacaggtgtggtttttgctgataaagtacaattctaacattgtaaataattgcataatccttccctgggaatttaaatcattttaactggttctgctgtaatactagaaatacaagcatgaaaaattctaatggtttattagtcacaatgactctgaaaaccttaataatacctattaaatattttgcatattacacatgaagaagagtttgaatctcagataaaaacaataaaaatacatgaaaagtctttcacgttagcacagattttaggcatctcgtgttcaggaggttggatctgagacgtgttttgagttggtcatagtgaaggacgctaggtgtaaattctagtgagaacaatttccaggaagccgtgttccgctcttgagcgagcacccactgggcctcatgcaaggtagaatgagcctgcgtacgtcaccctcccatgatgtggtcaacatgtaaactgcatgggcagggcgccaaataacatcctgtgcgctgctgagctgagctggggcacggccgcctgtctgcaccggcagcaccatgtcgctcacggtcgtcagcatggcgtgtgttggtgagtcctggaagggaatagaggaagggagtgtggggttggagatctgggcccagaggtggagatataggcctggaggtggagttgtgggcctggagtggagatctgggcctggagtggatatatgggcctagagatggagtgatgggcctagaagtggagatctgggcctggagtgccgataggaacctggaggggagataggagcctggagtggagatatgggcctggaggtggagttataggcctatagtagagatatgggcctggagtggagatttgggccaggagtggagatatgggcctagaggtggatatctgggcctagagtggaaatatgggcctaggatggagatatgggcctggttgtggagatatgggactggagaggagatatgggcctagagtggagatatgggcttggggtggagatctgggcctggggtggagatatgggcctggaggtggagttacgggccttcagtagagatatgggcctggggtggagatatgggcttggggtggagatctgggcctggagtggagatatgggcctggaggtggagttactggccttcagtagagatatgggcctggtgtggagatatgggcctggattggagatatgggcctaggttggagatctgagcctggagtggagatatgggcctggattggagatatgggcttacagtggagatcttggcctggattggcgatatgggcctggattggcgatatgggcctatgatggaaatatcggcctggagtggagatatgggcctggagtggagatacaggcctagggtggaaatattggcctggagtggagatatgggcttgtggtggggatatgggcttgtggtggggatctgggcttggaggctgggtctctgcacagccgacagccctgttcttgggtgcaggtaggcactgagggtgagtttaacttcagtccaggaagggcctgcctaccaagactcacagcccagtgagggcagcaagggagggctggtttgcctgcagatggatcgtccatcatgatctttctttccagggttcttcttgctgcagggggcctggccacatgagggtgagtccttctccaaaccttagggtgtcatctccccacataagaggattttcctgaaacaggagggaagtcctgtcagggagcctctcataaactaggaagaggggaccctggggtgctcggcccacagttccgacctcgcctccctggcctttcattcccttggcagagtcaagttctgtggggaccagggttagactggggtgctcaaagctggggtgcgtggtggggaagtggtaggaacagcagatcctctgaggacaaaggtgttactcacacttcagcgtttccatgacggtaggggctgcagtgtggctgctgtcactccaccagaagaggtgggaaaccacagccatggccctgacattccaaatcctctgatgggggctcagttgcttattttcattcaggcatctgctgatattccattctcaaagacatgccctccaccccatgtctaccctgtgttgttttatgtgagtaatcttacagtattaaaatctagtaggagtctcttactcagcacttgctcaaagttctcagctgacacttttgttgtagggagacaccttgtgtttgcgggatgggtccttcctttagccctgggcaccaaggtgtgatagcagccatagaaacttggaaagcgaggagaatcttcagagcacagggagggaggggtggctccacatcctcctctctaaggcggtgcctccttctccccaaggtggtcaggacaagcccttgctgtctgcctggcccagctctgtggtgcctccaggacatgtgattcttcggtgtcattcttatcttgggtttaacaacttcagtctgtaaaaggaagatggggtgcctggcactgagctctacaacagaatattctggaagagccttttcatgggccctgtgaccccagcacacacagggacgtacagatgtcggggttcacacccacactaccccagtgggtggtcggcacccagcaacaccctggtgatcatggccacaggtcagagggctcctgtcttggattctcctttcccacctcctgaatcccagagcttctggtgggcgtgtccttgagggtcccatcacccaggccctgactatatttggggtaaagggggattgaatacagggaaatgggtgctgtggtgggaagaataattgtccccagtgatgactacattctaatccctggagtctgtgactatttatgttataggggaaggaactgaaggggaagatggagctcaggttgttgatgagttgaccttgagatggggagacagcctggactgtcccgctgggctcagtgtaatcacaagggtccacatgaaaggaggaggaagaggggagtggggattagagcagcgcaatgggagactccaccagctttgaaggtggaggaaggccaggagccatgaatgcaggtggcctgtagaggttggaaaagtcaaggaaatgattctccagagtctccagagggaacgaagccctgcagatgccttgattttagcccaggaaaaacagggtcctatttctgtctccagtagtgaaatgggtcagtgtgctctctcctgctgccatgcttctgataattttctacagcagcaacaggaaaccaacactggaacccaggtcaaggacaaggtaagaaacaacacaaggatagccgggtgtggtggcaggcgcatgtaatcctagcgacttgggaggctgagggcaggagaatcacttgaacccaggagacagaggttgcagtgaccctagaccacaccacttcactccagctggggtgaaggagtgagactctgtctccataattaattaattaattaaaggaaccaaacaaggggaaggttggctacaccgagatgagcaagtgtgggatgatgatgccaccaccaggctccatccacatagggaggggttgatactcctcaaaccagcaccaggagccagcctatggaagctggcaccatggagaaggcacaggcatggcaagagtggctcccagtcccgaccaggaacagggtgtgtggacactggtgcctgccttattcatcagttcatacctactgccaaggattccaattcatccaaaagagattgaaccaggctgataagaggctggatgtgcagcctatcctggttcctctttcacccccacataaacagcaggaaagacattagtgtgaaatagatacaacaccccaagagatgaggctaagcccagtgggaagggaatcagaggcgactagagacagagggacagagaagagggagggagacagatggaaggacctgcaccaggagttatgggcacagaaaagaacatgaagacacagagaggaaggagagagacagacaccagcaaggggaagcctcactcattctaggtgccatggatgggatgataaagagagacaccttctaaactcacaacctctcttcctaggagtccacagaaaaccttccctcctggcccacccaggtcccctggtgaaatcagaagagacagtcatcctgcaatgttggtcagatgtcaggtttcagcacttccttctgcacagagaagggaagtttaacgacactttgcacctcactggagagcaccatgatggggtttccaaggccaacttctccatcggtcccatgatggaagacctggcagggacctacagatgctacggttctgttactcactcccccatcagttgtcagctcccagtgaccctctggacatcgtcatcacaggtgagagtgtccggacattcttctcattgtcattgggatgcagagtgaatgatccacgacttggaacccccaggtagttgtaaggaagatgagcttggtattcttatggagagagactgacttggtgaggtctgtaccaacagagacagagaaacaggagacacaagtacagaccaggtgtcataacagaggacagacacaggggccataccgggagttagaaaagacagaaggagttaaaggagacagacagacagacatgtcccagagagaggtgtccctccatgctgactttgctcagagacctggcacaggttagaagtttcatttctgttttacctccacaaagtgttctctaccaggagaacccaaggacacccatatttctgacctgagttgggccctgtggcctcaggccttgtggcacctacagatgccgtgtttattctgacacctctgccttccatgtaatggagagtaaccgtcccaggatatcatggccccagaacaccaactcctgtatgctgtgtgaacttgtggtctccagactggattctgaggctcacattccaaataaccccacatatgaaaggatcactgagaggcacagagagaaatcagggacaccaaaaagcaaagacataaacacacagagaatgagccagaggaaggagattgagagactcacagacacataaagagagagaaaagagggcagaggagtggtgagaatgatggaagggagcagagaaaagcactaaaattagactcctgagggagaggcacaaggacatagaaagatggagatgtggggatgaattgcagagattccaaagagaactagagagaccgagaggcagagcaagacagatgatagatggatagatatagatagatgataaataggtagatgatagataataggttaaagatacatagatgatgattgattgattcattaatagatgagacatagagatgatgatgatgaagacagatagataatacatagagatagagaggcagacagaagtcatagagagagagatgatacatagatatagataacagatgattgatggatagatagacaagtgatagatacatagatgatatatagatatagatgacaggtagagaatttgtagataggcaccgaatagataaatagatagatcgatagataatagatagaaatatgcagaaagttatgaacaggacacaaagtgagaaacttagaatttaaaaaagtaacatcaagtcaaccaatccaaggagagtcagagagaataaaacaatccaaaaagggaaaacatatctagaggtgtggaagcgaggtcagagacctagagagacagagaaggtggaaggaggaaatagacatgaagagagatggggtggagggtgagagagagagagagagagagcattaggtcatagagcaggggagtgagttctcagctcaggtgaagggagctgtgacaaggaagatcctccgtaaggaaaatgcctcttctccttccaggtctatatgagaaaccttctctctcagcccagccgggccccacggttctggcaggagagagcgtgaccttgtcctgcagctcccggagctcctatgacatgtaccatctatccagggagggggaggcccatgaacgtaggttctctgcagggcccaaggtcaacggaacattccaggctgactttcctctgggccctgccacccacggaggaacctacagatgcttcggctctttccgtgactctccctacgagtggtcaaactcgagtgacccactgcttgtttctgtcacaggtgaggaaagcccatggctgtcccatgtcctatgatcctagagccttagctgaggagcttcctgctgaggatggagagaaggatgaacagatgcagagagaagacgaagcttgggtgtgagggagggatcagggcacaggatggcagacagggcacctccaaaccctcctacatggcctgcatgaaggcctgcggccaggactccaggcacccaggcagatggagaaagcggtcaggagagacccagaggagggagactgggctcagtttgggaagatcagaggttccctcagcccctcaacattacccatttcccagaagcccatcctggcctcccacccacacagggatgtcatcacctgcaacccctacaccctttacttttgtttgagaaatatttattgaggataaatatacctatatagcttaccacctttaacattttttttttgaggcggagtctagctctgtcccctatgctggagtgcattggcacaatctcagctcactgcaacttccgcctcctgggttcaagcgattctcttgcctcagccacctgagtagctggtgctacaggcgcgcaccaccatgccaggctactttttgtatttttagtagagagggggtttcaccatgttggtcaagctggtctcgaactcctgaccacgtgatccacccgcatcagcctcccaaagtgctgggattacaggcatgagccaccacgcccagccacatttaccatttttaagtgtaaagtctagtggtcataaatacattaatatatatatatatacacatatttttttttaccctccacccttttcttcctggcctctggtagccaccattctactctctaccttcatgagatccaccttttagctcctgtatatgggtaagaaatgggaatctttgtaatgacctccagttccatccatgtggctgcaaatatcaggatgtttttctttctatggaagagtagtctccactatgcaaatgtaccacattctctctatccattcacccactgatgggcaggtaggttgactcctcatcttggctactgtgaagagtgctgcaccaatcatacgagtgcagatatcacttcgatatattgatttactttcctttggatataaacccagtagtgaaattgctggatactatgaaagttctctttttagtttttcgtttgttgttttgtttttgtttttgagacagtttccctctgtgcccaggctggagtacaagtgatgtcatcttggctcattgcaacctctgcctcctgggttcaaatgattttcctgcctcagcctccctagtatcagggattataggcgcacgccaccatgcctggctactttttgttttttttagtatagatgcggtttccccatgttggctgggctgctctcaaactcatgacctcaactgaggtgcccgcctcggtctcccaaagtgccgggattacaggcatgatccacctcacccaacctctttttagttctttaaaggacttccacacttttctccgtaatggctgtactaatttacactcctaccaacaggataccaggattctcctttctctaacaccttgccagcatttcttttgcctgtcttgcagctaaaagccattttattttatttcattttattttgagatggagtttcgctcttgtcacccaggctgagtgcagtggtgcgatctcggctcaccacaacctccacctcccaggttcaagcgattctcctgcctcagcctcccgagtagctggaattacaggcacacgccaccacgcccgactaatttttgtatttttagtagagacagtgtttctccatgtgggtcagactggtctcaaactcccgaccttatgagattcacccacctcaggctctcaaagttctaggatgacagacgtgagccaccacgcccggcctaaaagccattttaatggggtgagatgaaaactcactttgattttaatttgtgtttctctgatgatgagtgatactgagcactttttcgtatgtggggaaatttcatgtcttttgctcctgtttcaattaaatcatttgttttattgagttgtttgagcttcttatatttctagttattaatcccatctcagatgcatagtttgcacatatttgctcccaatctgtgggttgtctcttcactttgttggtttatttttagcggtgcagaagttgcttagtttgaggtaatcccaatggtctatttttgcttcgattacttgtgttttgaaggtttaaaacaaaatgtcttccttcagacaaacgtcctggagcatttccccaatattttcttctacgtgtttcataggttcaggccttagactcacatctttaatccattttcatttgatttttgtgtatagtgacaggcagaggtgcagtttcattcctctgcatgtcgatgtccaggtttccctgcactgtttattgaaaagactgtcctttcctgattgtgagttcttggcacctttgtcaaagtccattggatgggctgggcatggtggctgacacctgcaatttcagcactttgggagcccgaggtgggtggatcacctgaggccaagagttcaagattagtctggccaacgtgatgaaacatcgtctccactaaaaatataaaaattagctgagcatggtggtcagcacctgtaataccactactcaggagtttgaggcaagagaagtgattgaacccaggaggctgtggtggcagtgaaccgagattgcacctctgcactccagcctgggtgacagagcaagactccatctcaaaagaaaaacaaaaaatacattggaggtaaatgcatggattatatctgtgttattcattctgctccgttgttctatgtgcctttcttcatgccaacgtcatgctgtcttgcttactacagctctgtaacatattttgagatcaggtagtgtgatgctcctgttttctctttataccttgaagtctcaagacagtagccgtcacatacaaaaattacggaaaaaaggatcccaggactcccagggcccaatattagataacagagtgttggccatgaaccaacctcaaagatttccactgagtagaggacagacaccctcatttcctcacctctctcctgtctcatgttctaggaaacccttcaaatagttggccttcacccactgaaccaagctccaaaaccggtgagtacagaaccctcttatatccgcttttggaaacctggggaggtggaaaccttggattcaggcgttgactcagcatctcacagctctgacattgtacgcctgtcttctaccatctccaaactccagatactccaacagcgaaagggatctggacccaaaacagggctctgtgaaatctcttaatctctcattttatggagctgagatctcctacaagctagaaaaatgattggcaatctgacatccttctcaggaaaaatgcaatgtttgttctgcctgcattcctaactggaggataaattcctgggggcttgagagagggaagggtagggaacatttgatgagggcgaggtgttttagagaagttccacttgcccaggaatgaattactgttggtcatgaagcaaccctggctgactcagcagagcaagagctttgccttaacagagaacggagctcatgcacgcacacttcgactcactgactcattcagccacggccccatgctcaggccgtggaaaaggcaattcccagcactgcaggaggccaaggcgggtggatcacttgaagtcaggagttccagaccagcctggccaaaatggtgaaaccctgtctctatgaaaaatacaaaaattagccgagcatggtggtgcatccctgtaatcccagctcctactcttgaggatgaagcaggagaacgacttcaacccaggaggtggaggttgcagtgagtggagattgcatcactgcactccagcctgggtgacacaaggagactccgtctcaaaaaataaaaataagaaatgcataaatataataaaacacacacgaatgacaaaggcacctgaattccaatcatcatttttgtatttctctataattacttctttgatcctttgtcttatccattaggcaatgagcctaaaacctcttccgtatttggctttctgtgagcatgagaccatatagaaaatgtgaaagcctgctgaatcctccagcacagatcgtggaatagagaaagtgctctgttcatcacaaaaaaaacttgccctctcactcaaatcccccacttcacccctacttccaatcacctgtggagattcagatagaccatggggaggtaaacattaatactccttggagtgagtccagatcttggaatgagagatcagcaccagcactagctcctgctcccctttcctactaattcacaggaggacaggtggtattgaagcaatagatggtggagggggtggtccttcccccagcctctcaggtagaacagcagcctaacatgtgtctcccgagatcacaaagagtaggacgtttcacaggggcttcaacacgatttcctggctgttggacataagataactctatttcgcttttttatcttgatttcacttttgtttcctttccttggagaacgcaagttgtttgactcaagaatgctgtggatgtagaaatcctaaagcacattcgctgtgtgtcaatcccagtgcagtcttcccagaaaagaccctaaacacctcctagactgcacctgggcctacgccaattcctatcactcaccgtcactccagggagacagaacacacagagaatacgttacataggcaggttcattactaacagataagcagcgagtgaaaacagaagcctacatttcaatgtgagccagtccctcaaggctcagaaaagctgctcgggacatatggagtcaccccatttgcagtgtagctgggggaagccagaaagcagcccagcctgggttttgtaccctggagccacaggaagcactcagctaaagcactgcatgacgtcctcctccaggaagaacaggaagacagcccaggctgctctgggacgttcctcctgatctcaggacgttgctgtcttagtccatttttgttgctctaaaggaacacttgagcctgggcaacttctaaagaaaagagattggtttgcctcaccgttctgcaggctgtactggaagcatggcaccagcatctatttctcgtgatggcctcaggctgctcccactctggcagaagggaaggagggtctgtctgtgcagagaccacagagatcacacggcaagagagggagcaagggggagggggagcgatggagcttccaagttcttttgaacaaccagctctccaggaactaatagagggggaactagctaaccccgtctccttgggacagcattgatctgttcatgatggatccacctccatgacccaaacacctctcaagaggcccaacctcccacaatgggggtgaaatttcaatgtgaggtttgaaggggtcaaacatctcaactaaagtagttgtgtcctcagcacattctatggttactttgagagctataactgagaaagcaggagaaagctgggtctcccgccatctgggtgcttgtcctaaagaggtgttttacgtggttacctgtcaatcaagaaatgcgagacaattcataaagaggaactgctatgattagcttcttattggtgtctcatcttcttccaggtaacccaagacacctgcacgttctgattgggacctcagtggtcatcatcctcttcatcctcctcctcttctttctccttcatcgctggtgctccaacaagaaaagtaagtctcacgaaggagaggccagagagctcagggccatgtggggaagcaggatgggagcactcaggtgtgtgttcctcacaggtaggatggtccctggcccaaggcagcagccacagaggcaggactttctagagagggcaccagactccctgtccctgctttcagctcacagaccgttgcctgattctgaactgtatcctcatgtcccctgcagccactcacatccaggagaaggttccatgacaggcagaaagtgggagacagaatcaatgggatgggaactcagagctattcatgggatgggtccttgagctcagagagatagaatgtctgagtctgctgttggcaactgagggacctcaggcacctatggcctccccctgtttgttggtatctgcttatgaaatgaggacccagaagtgccctccgagctcttttgttgacttccgtctcctacacatgctgctgtaatggaccaagagcctgcagggaacagaacagcgaatagcgaggtaggtgctcctcggcccagcctcgtggctagtgttattcccaaacagtcctggaaaacgtgagcaccctccctcactcaggatttccctctctccaggactctgatgaacaagaccctcaggaggtgacatacgtacagttggatcactgcgttttcacacagagaaaaatcactcgcccttctcagaggcccaagacacccccaacagataccagagtgtacacggaacttccaaatgctgagtccagatccaaagttgtctcctgcccatgagcaccacagtcaggccttgaggggatcttctagggagacaacagccctgtctcaaaaccgggttgccagctcccatgtaccagcagctggaatctgaaggcgtgagtctgcatcttagggcatcgctcttcctcacaccacaaatctgaatgtgcctctctcttgcttacaaatgtctaaggtccccactgcctgctggagagaaaacacactcctttgcttagcccacaattctccatttcacttgacccctgcccacctctccaaccttactggcttacttcctagtctacttgaggctgcaatcacactgaggaactcacagttccaaacatacaagaggctccctcttaacacggcacttagacacgtcctgttccaccttccctcatgctgttccacctcccctcagagtatctttcagccttctgtcagcagtaaaacttatatattttttaaaataatttcaatgtagttttccctccttcaaataaacatgtctgccctcatggtttcggtaatgggactcttttcttgcctaagacttccattatcattaccatgtccacataaccccatctgttctccactgggttctcacccccggactctgagtttctggaagcagggtggagcctcatttgtctctgggactcctatttccatccaaagatgtagcacataggaggttccaaggatcgtgaatcacatgaacaagtgatattcttactctctgcagacctggaaatctggcagagtcattccaagatgaaacatttgtagaatcataggccttgttagtctcatctacacagggacacatatcaacacatcatctttcacactataaatatacagtcactcctccatatctgtggggtttacagttctttattgaaccgagtataaatcaaaaatattcagagaaagtatccacagagttacaaaaagcagaactgtgttgaatggacacaaatgaagctgtgtgtaggctgcatcaggaattataagtaatctagagatgatttcatgtatacaggaggatgtgcataggttatttgcaaactctgtgccatttcatataagaggcttgagcatctacagattttggtatctgagtggagatctcgaaaccaatcacccacgaatagtgaaggatgaccgtatatgacttttatttctcaaatttaaatataaatcataaaaaatgtacaactagataaaaactaagaagtgtttttatagtgtgagttagatttattttttcctaggtataacccattggtttaatattatttattgagaagacattctatgccaccttaaaccacacggcagcctttgtcaactctaaagggactgtgtgtacacggatgtactttagacactgtttctgctaaggggctctctgtgtccacactcttgatgatgctgcactttatgtagccttatagaaccctttaaatttagtagccagagctctctaatttgttattataggctatttgcttttttttcttgaggcggagtcttgctctgtcgcccaggctggactgcagtgacacaatctcagctcactgcaacttctgcctcccaggttcaagcgattctcatgcctcagcctcttgagtagctggcgttacaggtgcctgccaccaggcacggctaatttttggatttttagcagagacacggtttcactatattggccaggctgctctcaaactccttatctcagttgatccgcccacctcggcttcccaacgtgctggggaaacttgattttctatagcattatgttactggatatttctgtaaaatttaaaatgagggagggagagagacagacggaaaacaaactccagagttgggactctggaatcttgggtcatgagacaaattttagattaaactacaaaactccagaatttacaggtggggtttttactgataaagtacaattctaagattgtaaataattgcataatccttccctgggaatttaaatcattttaactggttctgctgtaatactagaaatacaagcatgaaaaattctaatggtttattagtgacaatgactctgaaaacattaataatacctattagatattttgcatattacacaggaagaagagtttgaatctcagataaaaacaatagaaatacatgaaaagtctttcatgttagcacagattttaggcatctcgtgttcgggaggttggatctcagacgtgttttgagttggtcatagtgaaggacactaggtgtcaaattctagcgagaacaatttccaggaagccgtgttccgctcttgagcgagcacccactgggcctcatgcaaggtagaaagagcctgcgtacgtcaccctcccatgatgtggtcaacatgtaaactgcatgggcagggcgccaaataacatcctgtgcgctgctgagctgagctcggtcgcggctgcctgtctgctccggcagcaccatgtcgctcttggtcgtcagcatggcgtgtgttggtgagtcctggaaagcaatagagggagggagtgaggggatggagatctgggcccagaggtggagatataggcctggaggtggagttatgggcctggagtggagatctgggcctggagtggatatatgggcctagagatggagtgatgggcctagaagtggagatctgggcccagaggtcgagatataggcctggaggtggagtgatgggactgtagtggagatctgggcctggagtggagataggaacctggaggggagataggaacctggaggggagatatgggcctggaggtggagatatgggcctggagtggagtcatgggcctggaggtggagttatgggcctgcagtagagatatgggcctgaagtggagacatgggcctggagtggagatatgggccaggagtggagatatgggcctagaggtcgatatctgggcctggagtggagatatgggccaggagtggagatatgggcctagaggtcgatatctgggcctggagaggagatatgtgcctaggatggagatacgggcctgggtgtggagatatgggactggagaggatatatgggcctggagtggagatatgggactggagaggagatatggacctggagtggagataagggcctggattggagatatgggcccagggtggagatctgagcctggattggagatatgggcctggattggcgatatgggcttagggtggaaatatcggcctggagtggagatatgggcctggagtggagatatgggcttgaggtggggatatggacctggaggctgggtctctgcacagccgacagccctgttcttgggtgcaggtaggcactgagggtgagtttaccttcagcccaggaagggcctggctaccaagactcacagcccagtgggggcagcaagggtgccctggtttgcctgcagatgggtcatccatcatgatctttctttccagggttcttcttgctgcagggggcctggccacatgagggtgagtccttctcccaaccttcgggtgtcatctccccacataagaggattttcctgaaatgggagggaagtcctgtcagggagtctctcataaactaggaagaagggaccctggggtgctgggcccacatttctgaccttgcctccctggcctttcattcccttggcagagtcaagttctgtggggaccagggttagactacggtgctcaaagctggggtgtgtggtggggaagtggtaggaacagcagatcctctgaggacaaaggtgttactcacacacttcagcgtttccatgacggtaggggctgcagtgtggctgctgtcattctaccagaagaggtgggaaaaccacagccatggccctgacattccaatcctctgatggggactcagttgtttattttcgttcaggcatcggctgatattccattctcaaaggacatgccctccaccccatgtctaccctgtgttgttttatgtgagtaatcttacagtattaaaatctagtaggagtctcttactcagcacttgctcaaagttctcagctgacacttttgttgtagggagacaccttgtgtttgcgggatgggtccttcctttagccctgggcaccaaggtgtgatagcagccatagaaacttggaaagcgaggagaatcttcagagcacagggagggaggggcggctccacatcctcctctctaaggcggtgcctccttctccccacggtggtcaggacaagcccttgctgtctgcctggccaagccctgtggtgcctccaggacatgtgattcttcagtgtcattcttatcttgggtttaacaacttcagtctgtaaaaggaagatggggtgcctgtccctgagctctacaacataatattctggaacagccttttcatgggccctgtgaccccagcacacgcagggacctatacatgtcggggttcacaaccacactaccccagtgggtggtcggcacccagcaaccccctggagatcacggtcacaggtcagagggctcctgtctgggattctccttgtcccacctcctgaatcccagagctcctggtgggcgtgtccttgcgggtcccatcatgcaagtcctgactgtatttggggtaaagggggattgaatacagggaaatgggtgctgtggtgggaagaataattgtccccagtgatgactacattctaatccctggagtctgtgactatttatgatataggggaagggactgaaggagaagatggagctcaggttgttgatgagttgaccttgagatggggagacagcctggactgtcctgatgggctcagtgtagtcacaggggtccacatgaaaggaggaggaagaggggagtggggattacagcagcataatgggagtctccatcagctttgaaggtggaggaagtccaggagccatgaatgcaggtggcctatagaggctggaaaagtcaaggaactgattctcctgagtctccagagggaacgaagccctgcaggtgccttgattttacccacgacaaacagggtccgatttctgtctccagaattggaaggggttagtgtgctctctcctggtgccatgcttctgataattttctacagcagcaacaggaaaccaacactggaacccaggtcaaggacaagttaagaaacaacacaaggatagccaggcatggtggcaggtgcatgtaatcctagcgacttgggaggctgagggcaggagaatcacttgaacccaggagacagaggttgcagtgagcctagaccacaccacttcactccagcctgggcaaaggagtgagactctgtcgccaaaattaattaattaattaaagaaaccaaacaaggagaaggttggctacactgagatcagcaaggctcagatgatgatgccaccaccaggctccatccacatagggaggggttgatactcctccaaccagcaccaggagccagcctatggaagctggcactggcatggcaagagtggctcccagtccctaccaggaacagggtgtgtggccactggtgcctgccttactgatcagttcatacctcctgccaaggattccaattcgtccaaaagagattgaaccaggctgctaagagcctggatgtgcagcctatcctggttcctcttccacccccacatagacagcaggaaagacattagttcgaaatagatacaacagcccaagagatgaggctgagcccagcggcaagggaatcagaggctactagagacagagggacagagaagagtgagggagacagatggaaggacctgcaccaggagttatgggcacagaaaagaacatgaagacacagagaggaaggagagagataagacaccaggaaggggaagcctgactcaatccaggtgccatggatgggatgataaagagagacaccttctaaactcacaacctctcttcctaggagtccacagaaaaccttccctcctggcccacccaggtcgcctggtgaaatcagaagagacagtcatcctgcagtgttggtcagatgtcatgtttgaacacttccttctgcacagagaggggatgtttaacgacactttgcgcctcattggagaacaccatgatggggtctccaaggccaacttctccatcagtcgcatgacgcaagacctggcagggacctacagatgctacggttctgttactcactccccctatcaggtgtcagctcccagtgaccctctggacatcgtgatcataggtgagagtgtccagactttcttctcattgtcattgggatgcagagtgaatgatccaggaattggagacccaggtggctgtaaggaagatgagcttggtattcttatggagagagactgacttggtgaggtctgtgccaacagagacagagaaacaggagacacaagtagagaccaggtgtcataacagagaacagacacaggggccataccgggagttagaaaagacagaaagagttaaaggagacacacagacagacatgtcccagagagaggtgtccctccatgctgactttgctcagagacctggcacaggttagaagtttcatttctgttttacctccacaaagtgttctctaccaggagaacccaaggacacccatatttctgacctgagttgggccctgtggcctcaggccttgtggcacctacagatgccatgtttattctgacacctctgccttccatgtaatggagagtaatcgtcccaggatatcatggccccacaacaccaacccctgtatgctgtgtgaacttgtagtctccagactggattctgaggctcatattccaaataagcccacttatgagaggatcagtgagaggcacagagagaaatcagggacaccaaaaagcaaagacataaacacacagagaatgagccagaggaaggagattgagagactcacagacacataaagagagagaaaagagggcagaggagtggtgagaatgatggaagggagcagagaaaagcactaaaattagactcctgagggagaggcacaaggacattgaaagatggagatgtggggatgaattgcagagattccaaagagaactagagagaccgagaggcagagcaagacagatgatagatggatagatatagatagatgataaataggtagatgatagataataggttatagatacatagatgatgattgattgattcattaatagatgagacatagagatgatgatgatgaagacagatagatagataatacatagagatacagaggcagacatagagaaatcatagagagagagagatgatacatagatatagataatagatgattgatggatagatagacaattgatggataaatagatgatatatagatatagatgacaggtagagaatttgtagataggcaccgaatagataaatagatagatcgatagataatagatagaaatatgcagaaagttatgaacaggacacaaagtgagaaactcagaattaaaaaaagtaacatcaagtcaaccaatccaaggagagtcagagagaataaaacaatccaaaaagagaaaacatatctagaggtggggaagtgaggtcagagacctagagagacagagaaggtggaaggaggaaatagacatgaagagcgatggggtagagggtgagagagagagagagagagcattaggtcatagaacaggggagtgagttctcagctcaggtgaagggagctgtgacaaagaagatcctccctgaggaaactgcctcttctccttccaggtctatatgagaaaccttctctctcagcccagctgggccccacggttctggcaggagagaatgtgaccttgtcctgcagctcccggagctcctatgacatgtaccatctatccagggaaggggaggcccatgaacgtaggctccctgcagggcccaaggtcaacggaacattccaggctgactttcctctgggccctgccacccacggagggacctacagatgcttcggctctttccatgactctccatacgagtggtcaaagtcaagtgacccactgcttgtttctgtcacaggtgaggaaagcccatggctgtcccatgtcctatgatcctagagccttagctgaggagcttcctgctgaggatggagagaagcatggacagatgcagagagaagacgcagcctcggtgtgagggagggatcagggcacaggatggccgacagggcacctccaaaccctcctacatggcctgcatggaggcccacggccagggctccaggcacccaggcagatggagaaagcggtcaggagagacccagaggagggagactgggctcagtttggggagatcagaggttccctcagcccctcaaccttacccatttcccagaagcccatcctggcctctcacccacacagagatgtcatcaccagcaacccctacaccctttacttttctttgaagaaatatttattgaggataaatatacctatatagcttaccacttttaacatttttttttgaggtggagtctagctctgtcccctatgatggagtgcagtggcacaatctcagctcactgcaacctccgcctcctgggttcaagcgattctcctgcctcagccacctgagtagctagtgctacaggcacgcaccaccacgccaggctactttttgtatttttagtagagaggtggtttcaccatgttggtcgagctggtctcgaactcctgaccacgtgatccacccgcatcagcctcccaaagtgctgggattacaggcatgggccaccaggcccagccacatttaccatttttaagtgtaaagtctagtggtcataaatacatttttatatatatatatatatacattttttttaccctccacccttttcttcctgtcctccagtagccaccattctactctctaccttcatgagatccaccttttagctcctgtatatgggtgagaaatgggaatctttttaatgacctccagttccatccatgtggctgcaaatgacaggatgttattctttctatggatgagtagtctccactgtgcgtatgtactacattctctctatccattcacccactgatgggcaggtaggttgactcctcatcttggctactgtgaacagtgctgcaccaatcatacgagtgcagatatcacttcgatatgttgatttactttcctttggatataaacccagtagtgaaattgctggatactatgaaagttctcttttttttttttttttcttttttgagaaagagtttccctccttagcccaagctggagtcaaagtggtgcaaccttggctcattgcaacctccgcctcctgggttcaaatgattttcctgcctcagcctccctagtagctgggattacaggtgcacaccaccatgcctggctactttttggtttttttagtatagatgcggtttccccatgttggctgggctgctctcaaactcatgacctcaactgaggtgcccgcctcagtctcccaaagtgccgggattacaggcatgatccacctcacccaacctctttttagttctttaaaggacttccatacttttctccgtaatggctgtactaatttacactcctcccaacagggtaccagggttctcctttctctaccaccttgccagcatttcttttgcctgtcttgcagctaaaagccattttattttatttcattttattttgagatggagttttgctcttctcacccaggctggagtgcagtggcgctatctcggctcaccacaacctccacctcccaggttcaagcgattctcctgcctcagcctcccgagtagctggaattacaggcacacgccaccacgccctactaatttttgtatttttagtagagacagcgtttctctatgtgggtcagactggtctcaaactcccaaccttatgagattcacccacctcaggttctcaaagttctaggatgacacaagtgagccacctcacccggcctaaaagccattttaatggggtgagatgaaaactcactttgattttaatttgcgtttctctgatgatgagtgatactgagcactttttcgtatgtggggaaatttcatgtcttttgctcctttttcaattaaatcatttgttttattgagttgtttgagcttcttatatttctagttattaatcccatctcagatgcatagtttgcacatatttgctcccaatctgtgggttgtctcttcactttgttggtttatttttagcagtgctgaagttgcttagtttgaggtaatcccaatggtctatttttgcttcgattacttgtgttttgaaggtttaaaacaaaatgtcttccttcagacaaacgtcctggagcatttccccaatattttgttctacgtgtttcataggttcaggccttagactcacatctttaatccattttcatttgatttttgtgtatggtgacaggtagagttgcagtttcattcctctgcatgtagatgtccaggtttccctgcactgtttattgaaaagactgtcctttcctgattgtgagttcttggcatctttgtcaaagtccattggatgggctgggcttggtggctaacacctgcaatttcagcactttgggagcccgaggtgggtggatcacctgaggccaggagttcaagattagtctggccaacgtgatgaaacatcgtctccactaaaaatataaaaattagctgagcatggtggtcagcacctgtaataccactactcaggaatttgaggcaagagaatgattgaacccaggaggctgaggttgcagtgaaccgagattgcacctctgcactccagcctgagtgacagagcaagactccatctcaaaagaaaaaataaaaaaccattggatgtaaatgcatggaatatatctgtgttattcattctgctccgttgttctatgtgcctttctttatgccaatgtcatgctattttgcttactacagctctgtaacatattttgagatcaggtagtgtgatgctcctgttttctctttatatcttgaagtctcaagacagtgggtgtcatataaaaaaattatggaaaaaaggatcccaggactcccagggctcaatattagataagagagtgttggccatgaaccatcctcaaagatttccactgagtggaggacagacaccctcatttcctcacctctctcctgtctcatgttctaggaaacccttcaaatagttggccttcacccactgaaccaagctccaaaaccggtgagtacagaaccctcttatatccgcttttggaaccctggggaggtgggaaccttggattcaggcgttgactcagcatctcacagctctgacattgtacacttgtcttccaccatctccgaactccagatactcctacagcgaaagggatctgggcccaacacagggctcagtgaaatctcttcatctctcattttatggagctgagacctcctacaagctagaagaatgattgccaatctgacatccttctcaggaaaaatgcaatgtttgttctacctgcattcctaactggaggataaattcctggagacttgagagagggaagggaagggaacatctgatgagggcaaggtgttttagagaagttccacttgccaaggaatgagctcctgtaggtcatgaagcaaccctggctgactccgcagagaaagagccttgccgtaacagagaacagagctcatgcacgcacacttcgactcactgactcattcagccacggccccatgctcaggctgtgcagtgtggaaccttttcctattgttgccataacaaatttccacaagattcgtgggtgaaaacaaaacggttttttaattatcttacagtgctgtagctcaaagtaggaagtgcatcttactgggctaaaatcaaggtgacagcaaggctgccttccctctgaggattccaggcacgaatctgcttctcacttgtcccagcttctaaaggctcccagttccttggctcctggtccccttcctccttcctcaaagcccacaaagactggtcacatctcacatggcatcactcagtgccttcttccttaccacacctctttctctgagtgctgctctcccttcttcctcatcttttgaaaacttggggattctattgggttcaccaagatgaaaatccctcataatctcctggaaatcatccaggatacccttgttttaagttcagctgattagcaaccataattccatctgcaatcttcattcctcctttccatgtaaaataacatattcacaagctatggaggctaggacagggacattttggggtgggacagcattctcctgccttccacaaacagtgaacaagatgcatttggcctctgcccttgggacactgatattgcagatggttaaatgggagggcagaaaatgaacgcacaagtggatctataaatgaatggtccattgggaagcatctgtgcatgaaatctattttttgtttgttcttttgtttattgagacagagtcgccctctgtcttccaggctacagtgcagtgtcacgatcttggctcactgcaacctgcgtctcctggattcaagtgattctcctgcctccgcctctcgagtagctgggattacaggcaactgccaccgtgcccggctaattctttttgtatattttttgtagagaggatgtttcaccacgttggccaagcttgtctgaaactcccaacctcaagtgatccgaccgtctcagcatgccaaagtaatgggactacaggcgtgagccactgtgcccagccagaattcaaaatcaataatagataatgctgagtgtatgatttcaggtgacaaagaaggtctcactattcagatatttgtgacattaatgaaaaacacggaatgaacccctgaaagattggcggaaggattttgcacacacagctgtcagccatgaaggcacaaaggtgaaaacaatctgatgtggaaggaagaggctctgactcaaatgctgggaatgaggtggggagaatgacaagacgactgtagagagacggagagcacactgggtacacaggaaactaaggagcaacaaggagtgtgtgtttgacactcacagccattggattcacctcggggtaaccaggaatccctacatgattaatatgactgacatgaaaataagggaggcccaggtgcataactggaatctaggagaccgtggaaaaggcaattgccgccccactggtgaaatgtggtgctgatttagacactaaatgaatgaagtagatggatataagatatgtttgtgaggtagaatcattgactggaaaggcttactgggtttgattttcctacttgtttaatcctcgcttaattaatttctttctgagatttattcatcctacacataaatcaatacctggcaaaggagtgacagatatatgagtggtggtggaaatgaagagacttattatagcataatatacaagtctgtgaacagtggctcacgcctgtaacctagcactgcaggaggccaaggtgggtggattccatgaagtcaggagttccagaccagcctggccaacgtggtgaaaccctatctctactaaaaatacaaaaattagccgagcacgatggtgcatccctgtaatcccagctcctattctggaggatgaagcaggagaatgacttcaacccagtaggtggaggttgcagtgagtggagattgcatcactgcactccagcctgggggacacaaggagactctatctcaaaaaataaaaataagaaatacataaatataataaaacacacacgaatgacaaaggcacctgaattccaatcatcgtttttctatttctctataattacttctttgatcctttatcttatccattaggcaatgagcctaaaacctcttccctatttggctttctgtgagcatgagatcatatagaaaatgtgaaagcccgctgaatcctccagcacagatcctggaatagagaaagtgctctggtcatcacaaaaaaaacttgcccactcacccaaatcccccacctcacccctacttccaatcacctgtggagattcagatagaccatggggaggtaaacattaacactccttgaagtgagtccagatcttggaatcagagatcagcgacagcactagctcctgctcccctttcctactaattcacaggaggacaggtggttttgaagcaatagatggccgagggggtggtccttcccccagcctctcgggtagaacagcagcctaatatgtgtctcccgagatcacaaagagcagcaggtttcacacgggcttcaacactatttcctggccgtttgacataagagaattctatttcgctttttttatcttgatttcacttttgttttctttccttggagaatgcaagttgtttgattcaagaatgctgtggatgtagaaaccctaaagcacattcgctgtgaatcaatcccagtccagtcttcccagagaagactctaaacacctcctggactgcacctgggcctatgccaattcctatcactcaccgtcactccagggagacagaacacacagagaatacgttacataggcaggttcattactaacagataagcagcgagtgacaacagaaacctatatttcaatgtgacccagtccctcaaggctcagaaaagctcctcgggacatatggagtcaccccatttgcagtgtagctgcgggaagccagaaagcagcccagcctgggttttgtaccctggagccacaggaagcactcagctaaagcactgcatgacgtcctccaggaagaacaggaagacagcccagggtgttctgagacgttcctcctgatctcaggaagttgctgtcttaggccatttttgttgctctaaaggaacacttgagcctcggtaacttctaaagaaaagagattggtttgcctcaccgttctgcaggctgtactggaagcatggcaccagcatctatttctcgtgacggcctcaggctgctcccactctggcagaagggaaggagggtctgtctgtgcagagaccacagagatcacacggcaagagagggagcaagggggagggggagtgatggagcttccaagctctttttaacaaccagctctccgggaactaatagagggggaacttgctaaccccgtctccttgggacagcattgatgtgttcatgatggatccacctccatgacccaaacacctctcaagaggcccaacctcccacagtgggggtgaaatttcaatgtgaggtttgaaggggtcaaacatctcaactaaagtagtcgtatcctcagcacgttctatggttactatgagagctataacagaaaaagcaggagaaagctgggtctcctgccatctgggtgcttgtcctaaagaggtgttttatgtggttacctgtcaatcaagaaatgcgagacaattcataaagaggaactgctaagattagcttcttattggtgtctcatcttcttccaggtaacccccgacacctgcacattctgattgggacctcagtggtcatcatcctcttcatcctcctcttctttctccttcatcgctggtgctccaacaaaaaaagtaagtctcacgaagcagaggccagagagctcagggccatgtggggaagcaggatgggagcactcaggtgtgtgttcctcacaaacaggatggtccctggcccaaggcagcagccacagaggcaggactttctagagagggcaccagactccctgtccctgccttcaactcacagaccgttgcctgattctgaactgtatccccatgtcccctgcagccactcacatccaggagaaggttccatgacaggcagaaagtgggagacagaatcaatgggatgggaactcagagctattcatgggatgggtccttgagctcagagagatagaatgtctgagtctgctgttggcaactgagggacctcagccacctatggtctccccctgtatgttggtatctgcttatgaaatgaggacccagaagtgccctccgagctgttttgttgacttccatcttctacagatgctgcggtaatggaccaagagtctgcaggaaacagaacagcgaatagcgaggtaggtactcctcggcccgggctcgtggctactgttattcccaaagagtcctggaaaatgtgagcaccctccctcactcagcatttccctctctccaggactctgatgaacaagaccctcaggaggtgacatacacacagttgaatcactgcgttttcacacagagaaaaatcactcgcccttctcagaggcccaagacacccccaacagatatcatcgtgtacacggaacttccaaatgctgagtccagatccaaagttgtctcctgcccatgagcaccacagtcaggccttgagggcgtcttctagggagacaacagccctgtctcaaaaccgggttgccagctcccatgtaccagcagctggaatctgaaggcgtgagtctgcatcttagggcatcgatcttcctcacaccacaaatctgaatgtgcctctctcttgcttacaaatgtctaaggtccccactgcctgctggagaaaaaacacactcctttgcttaacccacagttctccatttcacttgacccctgcccacctctccaacctaactggcttacttcctagtctacttgaggctgcaatcacactgaggaactcacaattccaaacatacaagaggctccctcttaacgcagcacttagacacgtgttgttccaccttccctcatgctgttccacctcccctcagactagctttcagtcttctgtcagcagtaaaacttatatattttttaaaataacttcaatgtagttttccatccttcaaataaacatgtctgcccccatggtttcggtaatgggactcttttcttgcctaaggcttccggtgttatcagtaccatgtccatataatcccatctgttccccactgagttctcatccccggactctgagtttctggaagcagggtggagcctcatttgtctctgggactccaatttccatccaaagatgtagcacataggaggttccaaggatcacgaatcatatgaacaagtgatactcttactctctgcagacctggaaagctggcagagtcattccacaatgaaacatttgtagaatcataggccttgttagtctcatctccatggggacacatatcaacacatcatctttcataatataaatatacggtcactcctccatatctgcggggtttacaggtgtttattgaaccaagtataaatcaaaaatattgagagaaagtatccacagagtttcaaaaagcataactatgttgaatggacacaaatgaagctgtgtgtaggctgtatcaggaattataagtaatctagagatgatttcatgtatacaggaggatgtgcataggttatttgcaaacgctgtgccatttcatataagaggcttgagcatctacagattttggtatctgagtggagatctcaaaaccaatcacccacgaatagtgaaggatgaccgtatatgacttttatttctcaaatttaaatataaatcataaaaaatgtacaactagataaaaactaagaagtgtttttatagtgtgagttagatttattttttcctaggtgtaaccaattggtttaatattatttattgagaagacattctatgccaccttaaaccacacggcagcctttgtcaactctaaagggactgtgtgtacatggatgtattttagacactgtttctgctaaggggctctctgtgtccacactcttgatgatgctgcactttatgtagccttatagaaccctttaaatttagtagccagagccctctaatttgttattataggctgtttgctttttttttcttgaggcggagtcttgctctgtcgcccaggctggactgcagtggcacaatctcagctcactgcaacctccgcctcccaggttcaagcgattctcgtgcctcagcctcttgagtagctggcgttacaggtgcctgccaccaggcacggctaatttttggatttttaacagagacacggtttcactatattggccaggctgctctcaaactccttatctcagttgatccgcccacctcggcttcccaacgtgctggggaaaacttgattttctatagcattatgttactggatatttctgtaaaatttaaaacgagggagggagagagacagacagagagcaaactccagagttgggactctggaatcttgggtcatgagacaaattttagattaaactacaaaactccagaatttacaggtgtggtttttgctgataaagtacaattctaagattgtaaataattgcataatccttccctgggaatttaaatcattttagctggttctgctgtaatactagaaatacaagcatgaaaaattctaatggtttattagtcacaatgactccgaaaacattaataatacctattagatactttgcatattacacaggaagaagagtttgaatctcagataaaaacaaaaaaaatacatgaaaagtctttcatgttagcacagattttaggcatctcgtgttcggataaaaatacatgaaaagtctttcacgttagcacagattttaggcatcttgtgttcgggaggttggatctgagacgtgttgtgagttggtcatagtgaaggacgtgaggtgccaattctagtgagaacaatttccaggaagccgtgttccgctcttgagcaagcatccactgggcctcatgcaaggtagaaagagcctgcgtacgtcaccctcccatgatgtagtcaacatgtaagctgcatgggcagggcgccaaataacatcctgtgcgctgctgagctgagctggggcgcggccgcctgtctgcaccggcagcaccatgtcgctcatggtcgtcagcatggcgtgtgttggtgagtcctggaaaggaatagagggagggagtgccacatcctcctctctaaggtggcgcctccttctcccccaggtggtcaggacaagcccttcctctctgcctggcccagccctgtggtgtctgaaggagaacatgtggctcttcagtgtcgctctcgtcttgggtttaacgaattcagtctgtccaaagaagacgggatgcctgtccctgagctctacaacagagtattccgaaacaccgttttcataggccctgtgaccccagcacatgcagggacctacagatgtcggggttcacacccacacttcctcactgggtggtcagcacccagcaaccccctggtgatcatggtcacaggtcagagggctcctgtctgggattctccttgtcccacctcctgagtcccagagcttctggtgggagtgtccaccagcgtcccatcatccagaccctaactgtatttggggtaaaaggggattgaatacagggaaatgggtgctgtggtggaaagaataattgtccccaatgatgactgcattctaatccctgcagtctgtgactatttatgttataggggaaggcactgaaggggaagatggagctcaggttgttgagttgaccttgagatggggagacagcctggactgtcctgctgggctcagtgtaatcacaagggtgcacatgagaggagaaggaagaggggagtggcgattagagcagtgcaatggaagtctccatcagctttgaaggtggaggaaggccatgagccatgaatgcaggtggcctatagaggctggaaaagtcaaggaactgattctcctgggtctccagagggaacgcagccctgcagatgccttgattttagccctcaaaaaacagggtccgatttctgtctccagaaacggaaggggtcagtgtgctctctcctgctgccatgcttctgataattttccacagcaccaacaggaaaccaacactggaacccaggtcaaggacaagataagaaaggacacaaggatagccgggcgtggtggcaggtgcatgtaatcctagcaactcaggaggctgagggcaggagaatcacttgaacccaggagacagaggttgcagtgagcctagaccacaccacttcactccagcctgggtgaaggagtgagactctgactccaaaattaattaattaattaaagaaaccaaacaaagagaaggttggctacaccgagatcagcaagggtgggatgatgatgccaccaccaggctccatccacatagggaggggttgatactcctcaaaccagcaccagaagccagcctatggaagctggcaccatggagaaggcacaggcatggcaagagtggctcccagtccccaccaggaacagggtgtgtggacactggtgcctgccttactgatcagttcataccttctgccaaggattccaattcgtccaaaagagattgaaccagtctgctaagagcctggacgtgcagcctatcctggttcctcttccacccccacatagaagcaggaaagacattagttcgaaatagatacaacagcccaagagatgaggctgagcccagcggcaagggaatcaggagctactagagacagagggacagagaagagggagggagacagatggaaggacctgtaccaggagttatgggcacagaaaagaacatgaagacacagagaggaaggagagagataagacaccagcgaggggaagcctcactcattctaggtgccatggatgggatgataaagagagatgccttctaaagtcacaacctctcttcctaggagtccacagaaaaccttccctcctggcccacccaggtcccctggtgaaatcagaagagacagtcatcctgcaatgttggtcagatgtcatgtttgagcacttccttctgcacagagaggggaagtttaatgacactttgcgcctcactggagagctccatgatggggtctccaaggccaacttctccatcggtcgcatgacgcaagaccttgcagggacctacagatgctacggttctgttcctcattccccctatcagttgtcagctcccagtgaccctctggacatcgtgattacaggtgagagtgtctggacattattctcattgtcactgggacacagagtgaatgatccacgacttggaggcccaggtggttataaggaagatgagcttggtattcttatggagagagactaacttggtgaggtctgtaccaacagagacagagaaacaggagacacaagtacagaccaggtgtcataacagaggacagacacaggggccatacagggagttagaaaagacagaaagagttaaaggagacacagacagacatgtgccagagagaggtgtccttccatgctgactttgctcagagacctggcacaggttagaagtttcatttctgttttacttccacaaagtgttctctaccagaagaacccaaggacacccatatttctggcctgagttgggccctgtggcctcaggccttctggcacctacagatgccgtgtttattctgacacctctgccttccatgcaatggagagtaatcgtcccaggatatcatggccccagaacatcaacccctgtatactgtgtgaacttgcggtccccagactggattctgaggctcacattccaaataaccccacatatgagaggatcactgagagacacagagagaaatcagggacaccaaaaagcaaagacataaacacacagagaatgagccagaggaaggagattgagagactcacagacacataaagagggagaaaagagggcagagaagtggagagaacaatggaagggaacagagaaaagcactaaaattagagtcctgagggagagacacaaggacatagaaagatggagatgtggggatgaattgcagagattccaaagagaactagagagaccgagaggcagagcaagacagatgatagatggatagatatagatagatgataaataggtagatgatagataataggttatagatacatagatgatgattgattcattcattgattaatcgatgatacatagagatgatgaagatgaagatagatagataatacatagagatagagaggcagacaaagagaaatcatagagagagagagacgatacatagatatagataatagatgatttttggatagacaattgatagataaatagattatatatagatatagatgacaggtagagaatttgtagataggcaccaaatagataaatagatatatcgatagataatagatagaaatatgcagaaagttatgaacaggacacaaagtgagaaactcagaatttaaaaaaagtaacatcaagtcaactagtccaaggagagtcagagagaataaaacaatccaaaaagggaaaacatatctagaggtgagaaagtgaggtcagagacctagagagacagagaaggtggaaagaggaaatagacataaagagagatggtgtggagggtgagacagagagagagagcattaggccatagagcaggggagtgagttctcagctcaggtgggaggggagttgtgacaaggaagaacctccctgaggaaactgcctcttctccttccaggtctatgtgggaaaccttctctctcagcccagccgcgccccatggttaaggcaggagagagcgtgaccttgtcctgcagctcccggagctcctatgacatctaccatctatcaagggagggggaggctcatgaacttaggttccctgcagtgcccaaggtcaatggaaccttccaggccaactttcctctgggccctgccacccacggagggacctacagatgcttcggctctttccgtgactctccctacgagtggtcagaccttagtgacccactgcttgtttctgtcacaggtgaggaaaccagtctgttccccaaatagtgggactcagatggactacaatggccacattcaggggagcctcagatggagggggtggccatgggggtgtcagccagagatgctggacagaagagacacaaagcaaacatacagaaagaggcatagacagacagacagagcgaggcagacagatcacattagggtttggggtggtaactgcaaccctacctgaagcttgcagatagagcacaggccacataaaccacttcccagtctttgtacagaagcccacctgggacacatgtaaacagcatcaatgctgactcaggagcatgaaaggccgggctcagattggaaagactagaggtagcattggccgcccgccattgcccatttccagaagcccccacctctcaccaaagagtgatttccacatggggggcacagatgcaaccatcgttgggggagccccaatgtctcttgatgggaggcattttccaccctagatgttttttgctctctccacaccttggagactcagtgggggagtcttctctggggactcggggagggcctccctgggactcgcaggatttccaagctagatgacaacatgacaggtggaaacaggcccattccttcgccaggggccccaagctccatcccaggagatgagaagaggctcttctcattggtcagtggatccctgaggggacagaggctcagcactgaaggctgagaaggatctgccacttcgctcagtggcctcaagccagacatcttccctacagacttgcagtgattctccatcagcatttagggctgtggccaccaacctgggtgttggtctgtaggaacttttcatttctgaccttccataactgagttctcttcctaaatgtggaatgccttgtactccatgttactctctccccagaaagaatgtgtggcttgtctgctctccagccctgtcatggagattgataatccttagggagcaagaggagagggaaagaacaaagtatgagaccacctaggtgctactggttgaggttccatttgccagtgaagggacttcactcagccgagggggcaactcagggaagtcagccgagggagggcattagagtagagagaactgagctcacccagtaaatgaccccttcactaactcattcatctaatatttatttcacacctaccatcagttctctctgtttcacggccaggagtagacagcacggccaagctcctgggttcatgatgctcacattgctgtggggtgggagagagaggcagaacatgaatgaatgaatgagagaatgaatgaatgagtgaatgatggaatgagtgaatgaatgaatgaatgaatgtatgaattagtgagtgaatccttagcacttggtgaaagtgccatgcacagaatgaaatgaatgaacgtggaacgttgtcatttggagtgtacaggagggaacgtctcactgagacctcatcagagagatcacatttaaactccgatcttagagacaagagggagtgagccctggggagtgtgttgaaaggaactttcatggacttaggacattggggatgaccctaatgtgagaatgagcttggtgtgttccaagaagtccatggacctgccatatggtgagggctggtcagaatccagagagatttctaaatgcccttgtgcttgtaaggaaagtgagtcctgtggttgggagtggacttataccttgggtcaggtccagcaattatctttctaaatcctctctaattgcctgaaccacttctatcaacaactgagaaaagaggagtgttaaacaccccactgtggccgtggatttgcctacctgtccatttatttccgcgactcttcctccatgtatatttgcaggaatattactgggagtggttaagtgtaaactgattatatattcctggtaaatttaaaatgctataaatttacctgcttttttcctacattttatgcttaatgttttccgctgatttttcccaaagactaattttgtctaattttaatatagttataccacatttctaacagtgattgcttggtatatttctacattgtttaatttcaaactccatgaattgttaacattgagatgtgtcctttgtaaatttcaaacaattcgccttagaaagtaagactttctgacaatcttttgttcatgtttgagcagttcttccaatcatatttttgttattattacgttgtgttttcctgattccctttttttcccactgacttctgtggttttctatttcaaacattctatttttgatctatgtcgtttaggaatacatatatggtgtactcatcctgaagttgttacatatttttaaaattgaaattaatcatttcagagattaaactgcaaatataaaaacatatttccactcttcctgtgtaagaacaggattttagagcatatttagtacatatgtttgtatttacttatatgatgttttgttttgtggtatacataattctatctttttcagaaattacacaggggcgtgttttcatacactatcgtatggtccatattcatttttggcatagccatatttttagttcttcctctgctcttagttattgtcagaatcttcgacaccccatctggtttcactttctttatctttgaggcacggtcatcagaatttcctttagggtcagtgagaaaagctttctttgcccttttgtctttcagttctgtttctttcctgcgttgatcttggacagtaactgtactatgtaaggaattgtcggtggctggcgacggtatcttagctgggtaaagatgctattctactggcttatgttttccttttttctgtggggaagacaatgcttggctccctataaatccttaccagctgatccttttcctctggctaattttaagggttggttgtgcttttatgctgcttttctgtaatgttgaacgtgaggtgtgtttacttcattctgcctggcattcactggatttcttgaacctgtggattgatggatgtgtctacttcctccaaataatcaacaattgcctctttaaagattgcttctgacctgttttctcgttctttctttttggaactcaagttaggagcattctaaaactgttgtcaatttttaccctgtcacaaaactgctctttcttgtttcagttatttgctttttctgtgcattaatattgatggtttcctctgtcatagaggataaatactctcttcactgttgtgtacacaacattttaactagttattctggtttaaatttaatattgactttatctacatatcacaattgattactgtgtacagactttcttttctattagtataaatttatgaggtacacttgtaattttgtgacatgagtatgttgcagagtagtgaagtcaggacttttactatatccatcacccaaataccgtacattgtactcattaagcaaattctcatcactcacccacgtcccgccaccctccagccttctagcctccgctgtccgtcattccacactctacgtccatatgtacacattactcccctcccatgtagagtgagaagatgtggtatttgtctttctgagtggttttatgtaaaataatggcgtccagctccatctatgttgctgcaaaagacatggttttatttttatgaccaaatagtatttcgttgtgtatacacgcatcctttttttaatccaatcattcattcacagacacttagattgatttcatatctttgctattgcaaacagtgctgcaataaacatacaggtgcaggtattttttgagtagatacccagcagcgggacccctagatcgaatggtgcttctatttttggttctctgccaaatttccatactgtcttccatagaggctatactaatttacataccggccaacagtgtataagagtttccttttctctgcatccttgccaacacctgttatatgtttcactttttctttttttctttttgagatggagtcttccactgtcacccaggctggagtgcagtgccgccatctccacgcgctgcaacctccaccaaccaggttcaaatgattctcctgcctcagcctcctgagtagctgggattacagaaccacaccaccatgcccagctaatcttttgtatatttagtagagatggggtttcactatgttggtcaggctggtctcaaactcctgacctcatgatccacccgcctcagcttcccaaagtgctgggattacaagcgtgagccaccactccccaccagcatttttagtaatagccattctgactactgtaagatgatatctcattgtggtttcaatttgcatttctctgatgattagtgatgttcatacgctgtttggccattcgtatgtcttcttttgaaaaatgtctatgtatatccctttgcccactttttaatgctattatttgaggggttatgtttagttgtttgagttgcctagaaattctggatgttagtcctctgttgggtgcatagtttgcaaacatttccattcattctgtgggttgtctgttcaccctgctactatttcctttgcttggcagaagctctttcgtttattaagtcccattggtctagttttatttttattgcctgtgcttttgaggtcttagtgatgaattctttgcccagaccaatgcccagaagagtttctctttgggtttccaccggtgattttatagttctggatttacatttaagctgctaattaccttaagttaatttatgtgtatgattacagatacaggtccagttttattcttctgcatatggctatttagttttcccagcaccttttattgaaaaggaaatctttctccagtgtatgttttgttaacgtcgtcaatgattattcactgtagatatgaggctgtatttctgggctctctattctggtctattgatctctgtttctgtgtctataccagcactgtgctatttaagttactatagccttagagcatagtttgaagtcagatagcgtgatgcctccaggtttctacattcacctagaattgctttctctattaggatcttttttggttctgtatgaattttaggattgctttttctaattctgtgaaaactggtgttactattttcatataagaattgcactgaatctgtagattgctttaggcagtatggtcattttaacaatattaattcttatgatccatgagcgtgggattttttttctttttttttttttgtattatctataattgctttcattggtgtcttacacctttcctggtacagatctttcaccaccttggttaaatgtattcctgagtgttttaattttgcgtatctattgtaaacggcattgccttcttgatttggttctcagctagatcattataggtgtagagaaatgctaccggcttttacatattgattttgtattctgaaactttacttagttcatttatcaatcataagaatttttggcagggtctttaggattttctagatttaagatcatagcatcagaaataaaaataattttacttcctcttttctaatttggatttttaattcttcctgttgcccaatagctctgacaaggcttccagtactatgttgataggaagtggtggatgtccgtgtccttgtcttgtgccagttctcagaggagtgcttttaacttttcctgttcagtatgatgttgactctagatatgtcatctatggcttttattattttgaggtatgttctttctatgcctaagtttttgagggttttcatcaggtaaggatgttgaatttcttttcagatgcttttctttatgtctattgagatgatcatatggtttttgttctggattctgctcgttcttctaagtggatgagacatgccagaaaagcatttagtcagccatcttggaaacaagcatctcagatgttttctttctctatagctcattctttcttaccagtgttttcaattttgtacttaattttgtaaagagagtaaatgatataatttccacatatgtttcctctgccaaatcagactcactatgcttcctttccttgtatacataacctacccagcaatacacacaaacatttattgctttggagaattagtttgggaacatttttgaaatgtacaaaaaaatgtatatcttcaaaagaaatttctttttgtggcaaaagacttctgaaggtgctcatgatgatatagggagaagaggggttctggacaggaagaattttatgaaggtgagatggggaaatagctccatttcagagcttctggggagagaggggcctggcccacatggaaaggtctctgatcttacccccaccctccagcccctgttctccagaactatactgtggagagttccatcaggattgttgtggctggtctggtcttcctggctcttttggcaatgctggctaagacctggtggagacatgaggggccacaggtggaaatggaagaaacatgactgaagctggctggagtgaatggcgcgacattctgtctgtgggagattggccagatgggtttcaagtgtgttgtatcagctgtgacttttagtaatgttcttgctaccacaatatccactcgtccatcccgaataattgtgatgaaatattgtccttgggataatattcatttgctaaagacagggatgatacctcaaggtgccactatatacatcgaggggatccacaaaagtccattcagtaaaatgtagttggcatcttagggtaggttgattccacctctaaaaaagtaggtacaacatcaggttgatttttccgaagaaaagtggtgattggccatctttagtctcaatgtaaacggtaatactgatgagtgtggaaaaggcagggaagaggattgacaataagtgacactcattgttttcatctgagctttgagactgaaagaggaacacaggagtgagatgtatgggaacaaaccccttctttttccagctaaacagagtggaagttggacactgagttttggcgtacagcaaaatcctaagtccattgttgggttgaacacggccatgttgtacatcctggtttcacagcagacactggaggaaaacagcctgtattcataagaggctgtccctcgggtcactgcccagaatatccggagttggtgctcacagggttgggaactctcctggaccagacaggctctggatatgggggggtaccaagctccccggggccatgcctccacagctctcttctcacctcattcttgaccatttcccaaacctctgacctcaccttcattcatccatggtgaacacgctaaaactggccttcaaagcttgagacagaggaaaattgggcttcatctctgggaactaaattggggagtggagactcagttctggcctgacaggagggagaagaccctggatcccagtgtggatgggaagaagtatgtgtttctcttttgtgcttggaccctgtgtccaagcatgtctgagatgtgatgaagatgaatcttcctttccttgtctattttctcatgccagagaattggaatcttatattccattaactctttctgttctgttcatccagattctatgaaggagaaaggaaaagatgtgatactgtaattttgctccatttgtctaaaatgagtaggctgcaactcctcttgaagtgataccttttctagctcttgttggaggtgtctcaggactcattacttcggggaacctgcaactgtgtcagtctggggaaactgcaaatattcttgtcttacatttgtctccagccaattgtgatggactccagtgacctgcaattgctgttattgcaggtaaaatgtacctgagtcaggccacagttctcctggactatgagcccctggccatgttcctgaggcaattctgttcatctaaatataataataataacacactaaaaatggcaagccattgttaattcctgaagtctcatttgaaaattactaaatgtctgttattttttggtgtttacattatatgtagacagataaactacacacacacacacacacacacatgcacacagaagaatggattgtttcatgtagaaaagtaaataattcaagatgaaaggatgaaatgtcatggcacctactattctattttagataaagggtctatgaaaagattgatttctttttatgttttatttgttgacatttgaacacaaactatgtaagtgagggagtcgatttgaaagggagaagagcaagttcaaacacattcaggtgaggtcatgctttacatgttttaattgaaatgatccatcttgggagtagatcaataactgagatggtgccaggaatgttaaaaagcttttgtcagtcctaaatattgacaaataaaatttaattaaagtcttagaagaaaacacaaaggaaaacttcacaacatcggatttggcagtgattctttagatgtgacaacaacggcacaggctactacagaaaaaataaacaagttagactttatgaaaattttgaaatattgtgactcaaaagacaacatcagttacttcacatggcaaggaaaaagaacttttaagacgatattatcaaagtaaaaagacaacccacagaatgggagaaaatgttttcaaaccacaccacctgtaagggattaacatccagaatatacagacaactcctaaaactcaatcacaataaactcaattcaaaaatgggcaaagtactgaaacagacatttctccaaagaacatacgcatgaaaagatattcagcatcacgaatcattagggaaatactaactaaaactacaccagatgccatttcataccccttaggatgggtatcatcaaaacaacaacaacaacaacaacaaagtttctatacattaacaacaaactatccaaaaaagtttacaagaaaataagcccatttgcaataactacagaaaacaaaacatgcaggaataaattcacccaaggagtagaaagatctgtatgcaaaagctataaaacattgatgaaaaaactcaagaaataaacaaataaatcgaaagatattccatgttcacggatcagaaggattaatgttgttaaaatgtccattctatccaaagtgattcaatgcaaccattatcaaaaatccaatgacattttttttacagaaatagaaaaaacagtcctaaaattcatgtggaaccacaaaagatctcaaataaccaaagccatctagagggaaaggaacaaagttggaagcatcacattacctaaacacaaactacattacaaaattacagtaattaaaacaacacagtacttgcataaaaacagacacatagaccaatggaagtgattcatagcccaggaaaaaaatgcatgcatttagggtcaaacaatttttgggatgtgtcaagaacacacaatggagaaggaacagtctctttaataaatgggattgggagactgcatgtccacatgcagaagaatggaagtggacatttgcctcacaaaacatacaaagtcaactcaagatagattaatgacttaaatgtaagatgaaagactataatcccagcaatttgggaggccaaggtgggcagatcacctaaggtcaggattccaagaccagcatggccaacatggtgaaatcccgcctctactaaaaatacaaaaacagctgggtgtggttgtgggtgcctgtaatctcagctactcgggaggttgagacaggagaatcacttgaacccaggaggtagaggttgcagtgagccgagatcgcaccactgcactccagccggggcaacacagtgagactccatcttaaaaaaaaaaaaaaaactactaaaagaaatcaagggaaaactccactggcttgggcaaaaccattttggatattaacccaaaggcccaggcaacaaaagcaaaagtagacaaataacattatatcaaattgaaagtttctgcaaagaaaaaaaaaactcaacaagtggaaagacaacctatggaatgggagaatatatttgcacccatacatctaataaggaattaatatccaaaatatataagaaactcaaacaactcaatggtaagaaatcaaataacccaacttaaaaaaatgggcaaagtatctgaataaacatttctaagaataagacaaatcaccaaaaggtatatgaaaaaatgattagcattactaaacatcagctaaataaaaattaaaactagaatgagatatcacctcacacctcttagaatgaccattaacagtctgggcatggtggctcatgcctgtaattcaggcactttgggaggccgaggcagggagattacctgaggtcagcagttcgaaaccagcctggccaatatggtgaaaccccatccctactaaaaatacaaaaattagcagagtttggtggcgcacacttgtagtcccagctactctggagactgaggcaggggaatcgcttgaacccaggaggcagaggttgcagtacaccgagattgtgccactgcactccagcctgggtgacagagcaagactgagtctcaaaaaaaaaaaaaaaaaaaagaccattatcaaaaacataaaaaataacaagggttaacgaggatgtggagaaaagggaacatttgtatgcagttgatgggaatgtaaattagcacaaccattatggaaaacagtctggaagttcctgaaaaaattaaacatagaattcccatatgtgtctgcaatccaactactgcgcatgtatccaaaggaagtggaatcagtatgttgaagagatatctgcattcccatgtttacagccgcattattcataacagccaagatgtggaatcacccttactgcccatctatgggtgcatggacaaagaaaacgtggtatacgataggaacgtaatgaagtactatacaacctttacaacaaagaaggaagtcctctcatttgtgacaatgtgaaaaaacttagaggacattatgttaagggaaacaatccaggcacagaaagacaaatgccacatgatctcatgtgtggagtgtaagaagtggaacctagaggaacagtaaaatggtcgtcgaaagaacctgggatggagagagattgaagagatgttggtcaaaggatgcaaaatttcagttagaagaaatcggttcaagagatctattgtatgtcttggtgactccagttaatagcaacatatggtgtattgaacattactaagagattagattttacatgttctcaccacacacacaaaacatacaagtatgtgaaaaaataaatatgataaagaggttgtttcatccattccacaatgtgtacctatatgaaaacatcatgatggacaccacaaatacccttttcctcattaattaaatttgttttggttttttttttgagatgcagtttcactgttgttgcccaagctgaggtgcaatggcgtgatctccgctcactgcaacctctgcctcccaggttcaagcggttctcctgactcagcctcccaagcagctgggactacagttgcgtaccaccccgtccggctatatttgtgtttctagtagagacagggtttcgccatgttggccaggctggtctcgaactccagacctcaggtgatccacccgcttcgccctcccaaagtgctagatttcaggctgagacaccacacccagcctgtacattgactttctgcccttaaactgtgctgaagtttgtttctcagatgtaggagcctttgggcagagactatggggtttctaggtatagaaattatctcatcttcaaacagaggtaatttgactacctctctctgctactctcttcttacttggatgccttataattctttctctttcctgatggctctgtctaggacttcaagtactatgttgaataggatggtgagagtgggcattcttgtcttgtttcacttatgaagggaacttcttccagcttttactcattcagtatgatgttggttgtgggtttgtcacaggcggctcttattatattgagttatgtttcttcaatgcttagcttgttgagggcttttaacatgaagaaatgcttagtaaaaagtatgttctacatgtgtgttgagaagatcatgtggtttttgtttttagttttgtttaggtgatgaatcacatgtattgattgtgtatgttcaaccaaccttgcaccctaagaataaagttgacttgatcatggtggattcactttttgatatgctgcgggattcagttcttagtattttttgtggatttttgcctctatgttcatcaggaatattggcatgtagttttcttttgtttaatgttcttttctgtctttagtatcagggtgatgccagccttatagaatgagtaaaggccaccctgggcaaacagtgagacccatccctttttaaaaattatgagttttacaaatttaaaatgcatagtgaaaaagttcttacaaactccagaaagataggtgtaaataagagacatttgtaagaatgacagcacattaaatgtgtagatttcaaccttcagttattgcaatattccagtatcaagttggaggatgttatcagtctgatattttttcctcaaatgagagagagaaagaaagacacacaaacaacacagggagaaaaaaagcacacgttacagagagacaaaaagggagacagggaactgtgaatttggactcttgtgtcataagacaaattctagataacacgaccagaccttcaattgacatattgtgtttttgctaataaggtggaattctatgatgcgaaataactatatagtcttttctactgggatttaaatcattttatctgtttctggcttaacaggaaaaatacaaccatggaaaattatgatgatttatttaatacgattgctctatagtgttaataaaacctattaggtattttgcatattacatatcaaggagagtttgaatctcaggtagaaacaaaaaaaaatacatcaaatttcctcatgtgagtgcagaattcaatcgtcccgtgcaggggtaagtgagtctgagatgtgttttgagcctggccgttgcgcatgatgtgaagtgacaagtctagtctgcagttttcagaaaccctcattcctcccttgactgattcaccacttgaacctcatatgacgtagaagaagcctacctatgtccccttcacatgttgtggtcaatgtgtcaactgcacgatccgggcccctcaccacatcctctgcaccggtcagtcgagccgagtcactgcgtcctggcagcagaagctgcaccatgtccatgtcacccacggtcatcatcctggcatgtcttggtgagtcctggaagggaaggagcaccagggttacactatgggcctgcagattgggtgtctccccagcagagagccatgttctgaagcaagtgagtggtgaggatgagttaattttcagtccagcgtggcgcccagtggctcaggaggaaagggtaggttgctgccgagatgaatagttcatcatgatctttctttgcagggttcttcttggaccagagtgtgtgggcacacgtgggtgagtccttccccaaatgatgggttgccatcttcaccccaatacaagtgaattttccagaaatgggagggaggcagcacagagggtgggctgatgggctgaccatgggaaggcctggggggagtctctcatgaactagtaagaggagatcctgggagtctctcatgaactagtaagaggagatcctgggagtctctcatgaactagtaagaggagatcctggtatgctcagccctctgttttgtcttagccctccccagcctttcttccccatggctgagttgagctctgtgtggcccaggcgggatactgaggtgctcaaagctggggtgtgtggggggatgtggtgtcaccgacagaggagggaagggtagcagtgttaggaacagcaggtcctctgaggacaagagggtaactcacaccctccagcgtttccatgacggtaggggctgcagtgtggctgctgtcattctgccagaagaggtgggggaaccacagccacgaccctgccattccaaatcctctgatggagctcagttgtttattgtggttcaggcattagctaatattccattcacaaaggtcataccctccaccccatgtctactttgtgttctttggtgtaactaatcttgcagtattaaaatctagtaagagtcccttactcagcacctgctcagttctcaactgacacttttgttgtagggagacgccacgtctatgcgggatgggtccttcctgtagccccaggcacccaggtgtggtaggagccttagaaagaagaaatggggagaatcttctgagcacagggagggaggggcagctcaacatactcctctctgaggcggcatctccttctccccaaggtggtcaggacaagcccttctgctctgcctggcccagcgctgtggtgcctcaaggaggacacgtgactcttcggtgtcactatcgtcgtgggtttaacatcttcacgctgtacaagaaagatggggtccctgtccctgagctctacaacagaatattctggaacagtttcctcattagccctgtgaccccagcacacgcagggacctacagatgtcgaggttttcacccgcactcccccactgagtggtcggcacccagcaaccccctggtgatcatggtcacaggtcagagggctcctgtctgggcttctccttgtcccacctcctgagtcccagagcttctggtgggggtgtccaccagagtccgatcatccaggccccaactatatttggggtaaagggggattgaatacaggggaatgggtgctgtgttggaaagaataactgtccccatcgatggccacattgtaatccttggagcctgtgactatgttatagggcaggggactgaaggggaagatggagctcaggttgttgatgagttgaccttgagatggggagatggcctggactctcccactgggctcagtgtaatcacaagggtccatatgagtggagaaggaagaggagaatggggattagagcagcatcgtgggatactccaccagccactgtgggctttgaaggtggaggaagaccacgagccacgaaggggctggagaaatcaatggaactgattctcccgagtctccagagggaatgcagccctgcagatgccttgattgtagcccaggaagaacagggtctgatttctgtctccagaagtggaaggggtcagtgtgttctctcctgccgccatgtttgtgataattttctccagcaacaacaggaaaccaacacaggaacccaggtgaaggacaagttaaaaaaccaaacaagaaggttggctaccctgagatcagcaagggtgcactgctgatgccaccaccaggctggaaccacatagggagggatcgacaggaagagttgggggtggagggtgagagagagagagagagcactaggccatagagcagggcagtgagttctcagctcaggtgggaggggagctgtgacaaggaagaacctccctgaggaaactgcctcttctccttccaggtctatatgagaaaccttcgcttacagcccggccgggccccacggttcgcgcaggagagaacgtgaccttgtcctgcagctcccagagctcctttgacatctaccatctatccagggagggggaagcccatgaacttaggctccctgcagtgcccagcatcaatggaacattccaggccgacttccctctgggtcctgccacccacggagagacctacagatgcttcggctctttccatggatctccctacgagtggtcagacccgagtgacccactgcctgtttctgtcacaggtgaggaaagccaatgtctgtcccatgtcctatggtcctagagccttagctgaggagcttcctgctgatgatggagagaagcatggacagatgtggagagaagatgcagcatggtgtgagggtgggatcagggcacaggatggcagacagggcacctccaaaccctcctgcatggcctgcatggaagcttgcagtaagggctccgggtacccaggcagatggagaaagtggtcaggacagacccagaggagggagactgggctcagtttggggagatcagaggttccctcagcccctcaaccttacccatttcccagaagcccaccctggcctctcacctacacagagatgtcatcaccagcaacccctacactttttcttttcctttgaaaaaatgctgattgaggttaaatatacctatataatttatcaactttaccatttttaagtgtaaaatctagggatcataaatacctttatatgctgtgtgcggtggctcatgcctgtaatctcagcattttgagacgccaaggcaggtggatcatttaaaatcaggggctggagaccagcctggccaacatgggggaaccaatctttactaaaaagacaaaaaaaataaaattagccaggcatggtgccaggcgcctataatcccagcaacttgggaggctgaggcgggagagtggcttaaacccaggaggaggaggttgcagtgagctgagatcatgccactgcactgcagcctggtgacacagagagactctgtctctaaataaataaataaatacttttatattcttcttttgttaccctccaccccttccttcctaacctctggtatccaccattctactctctaccttcatgaggtccaccttttacatcctgcatgtgagtaagaaatggcaatccttgtaatgacctccagtccatccatgtggctgcaaatgacaggacgttactctttgtatggatgagttgtctccattgtgtgtatgtactactttctctctatccattcatccactgatgggcaggtaggttgactccacatcttggctactgtgaacagtgctggaacagtcatgggagtgcagatgtcacttcaatacactgaagtccttttctttgcatttacacccactagtggaattgctagatcctctggatgttctctttttaggttttgttttatgctttttgtttttttgacatagcgtttcactcttgttgcccaagctggagtgcaatggcaccacctgggctcactgcaacctctacctccaggattcaagtgattctccagcctc[134 bp omitted]cagcctcccaaggtgctgggattacaagcgtgagacacagtgcctaatctctttttagtttttaaggaacttccatattcttctcctctgtaatggctgtattaatttacattcctatcaacagtgtattagggttctcctttctccaccaccttgccaacatttgttttgtctgtctctgagataaaacccattgtaatggggtgagatgatagctcattgtgacttcatttgcatttctctgatgattagtgatactgagcactttttcatatatgcaatgtatatatgttcatttgtatgttttgttcattgagaaatgtctgttcaggtcttttactaattttataattaaattattagttttattgaggtgtttgagcttcttttatattctagttattaatcccatctcagatgcatagtttgcaaatatttgctcccattctgtgggttgtctcttcttcacttcattggttgcttcctttgcggtgcagaagctgcttgatttgatataatcccaatggtctatttttttgttgttgttgtgattacttgtgtttttgaggttttaaacaaaatgtcttccctcagacaaatgtcctggagcatttctccagtgtttccttttagacatttaatggattcaggtcttaagtcattaatccattttcatctgatttttgtgtatggtgagaggtagaggtgcagtttcatccctctgcatgtagatatccagttttccctgcaccatttattgaaatgactgtcctttccagattgtagattcttcgaacctttgtcaaagtccattggatgtaaatgggtggattacatccgtgttcttcattctgctccattgttttatgtgcttttctttatgccaatgtcatgttgttttgcttactacagctctgtaacatatttttaagtcaggtagtgtgatgctcctgttttctccttataccttgaagtctcaagatagttggtgtcacctacaatgattatggagaatgggatgccaggactcccagggcccaacattagataatagaatgttggccatgaaccaacctcaaagatttccattgagtagaagacaggcatcctcattgccacacctctctcctgtcccgtgttctaggaaacccttctagtagttggccttcacccactgaaccaagcttcaaaactggtaagtgaaggacccctcttatctctgcttttggaaacctggggaggtagaagccttggattcaagcgttggctcagcacctgccagctctgtgattgtgggcctgtcttccattgtctctgaaccccagacactccaacagcgaaagggatctgggcccagcacagggctcagtgaaatctcttaatctctaattttctgctgctgagacctcagggtagaaggatgagtgcaaatcagacattcttctcaggaaaaatgctgtgtttgttctgcctgcattcctaactgggaggacaaatgcctgggggcttgagaaggggaaggaaggggaacatttttgagggtggtgtatttgtagagaagttctacttgccaaggaatgagctcctgtctgtcatgatccaaccctggttgacttagtggaacaagagctttgcggtaagagagaacgtagttcatccgtgcacatgacacttccacttactcgttcagccactgccccatgctcagactgtgcagtgtggaaccttttcctatgttgccataacaaatttccacaagcttcgtggatggaaaccacatttttaaaaaatatctcatggtgctgtagctcagaagtatgaaatgcatcatctcactgggctaaaatcaaggtgacagcaaggctgccttccctctgaatgttccaggcaagaatctgcttcctcacttttcccagctcctagaggctcccacattccttggctcctggtccccgtcttcctccctcaaagtccacaaaggctggtcacgcctctcacacggcatcactcagacccttcttccttgtccacacctctttctctgaatgctgctctgccttcttcctcatcttttaaggactttggcattctattggaaacaccaagataatccatcataatttccctaaaatcatctaggataccctccttttaaggttagctgattagcaaccgtaattccatctgcaatctgcattccttttttccatgtaaaataacatattcacaagatatggcgactaggacaggaatattttggggtggggcggcattcttatcctttccacaaatggtaaacaaggtgcatttggcctctgctcttggacactgatattgcaaaggattaaatgggagggcagaaaatgaatgcaccagtggaccaataaatgaatgatccattgggaagcatctgtgcatgagaatgattgattgattggttgtttttatgagacagtgtctccctctgtgccccaggctggagtgcagtggcgggatctcggctcaccgcaacctccacctcccaggttaaagcgattctctacactcagcttcccgagaggctgggattacacccatgtcccaccacgcctggctaatttttttttggtatttttttttagtacagacaaggttttaccatgttgcccaggctatctcaaactcccaaccttaagggatccgcccgtctcagcctcccaaagtgctgagattagaggcgtgagccaaggcgccgagccgtattttaaaagaaataatagataatgctgagtgtataatttcgggtgacagagaagttctcactgatcaaataatacttgtgaccttaatgaaaaaaatagatcaacccctggaagattggcggaaggattttccacacagctgtcagccgtgaaggcacaaaggtgaaaacaatgttatgtggaaggaagaggctctgcctgaaatgctgggaatgacatggggagaatgacaagacgactgtggagagacagagagcacactgggtacacaggaaactaaggagcaacaaggagcgtgtgtttgatactcacagccattggacttacctcggggctaactgggaatccctacatgatgaatagtgactgacatgaaaataagggaggcccaggtgcataactggaatctaggagactgtggaaaaggcaattcccgcccccctggtgaaatgtggtgctgatttagacactaaatgaatgaaagatggacacaagatgtgtttgtgaggtagagtaatttgcagggagggcttgcctggtttgatttttcctaattgtttaatcttcacttcattgatttctttctgagatttatttttcctacatgtaaatcaatacttggcagaggagtgagagatacatgaggggtggtgcaaaggaagagacctattataatataacacacaaggttctgaacggtggctcacacctgtaacccaacattttgggaggctgaggaggctggatcaagtgagatcaggagttcgagatcagcctggacaacatggtgaaaccccatctctactaaatatacaaaaactagctgggggtggtggcgcgtgcctgtaataccagctattcgggaagttgaagaaggagaatggcttcaaccagggagggagaggttacagtgagccaagatcgcgtcattgcactgcaccctaggtgacagagtgagactccatggcaaaaaataaaaataaagaatacataaatataatataacatacacgaatgacaaaggcacaccaattccaatcatcatttttctatttctctataatgacttctttgatcctttatcctatccgtaagaaaatcaggcgaaaacatcttccttatttggctttctgtgagcatgagatcatatggaaaatgtgaaacccaccagcacaggtcctggaatagagaacgtgatctgttcatggcacaaaacttgccccttcacccaaatcccccacctcacccctacttccaatcacattaatgatacagatagatcatggggaggtaaaaactaatattctttggagttcagatcgtagactcagagaccagtgccagcactatctcctggtcaccttttggagtaattcacagaaagacaggctgtattgaagcaacagatgatggagggggtggtctttcccccagactctcgggtggaacagcagcctaatatctgactcccaagatgacaaaagtagcatgttgcccacgagcttcatcattatttcctggctgtttgatataagacagctcaacctcacttatgttgatttcaatgtcactgttttttccttttcttggagaatgtaatttgtttgagtcaagagggttgtggatgtagaaactgtaaagcacattcactgtgtatcaatcccagtccagtcttcccagagaagactctaaacacctcccatactgcacctggggctgtgccaatttctatcactcaccatcactccagggagacagaacacacagggaatacattacataggcaggttcattacttatagataagcagcgagtgacaacagaaaccttcctttcagggtgagccagtccctcaaggctcagaaaaactgctcaggacacatggagtcacttcatgtgcactgtagctgggggaagccagaaagcagcccagcctgggttttgtaccctggagccacagggaacactcagctaaagcactgcatgatgttctcctccaggaagaacaggaagacagcccaggctgttctgagacgttcctcctgatctcaggatgttgctgtcttagcctatttttgttgctataaaagaacacttgagcctgggtatcttctaaagaaaagagatgtgtttggctcactgatctgcacgctgtactagaagcaggacactaccatctatttctggctgcggcctcaggctgctcccacactgacagaagagaagggggtcctgcgtgtgcagagaccacagagatcacatggcaagagagggagaaagggggtgtgatggagcttccaagctctttttaagaatcaactctccagggtactaatagagggagaacttgctaaccccgtcctctggggacagcattaatctattcatgatggatccacccccatgaccaaaacacccctcccaataggcacaactcccacactggggattaaatttcaaagtggggtttggaggggtcaaacattgaaacaatagcagttgtatcatcagcacattctattgttattatgaaaactataacggagaaagcaggagaaagctgggtctcccgcctcgtgggtgcttgtcttaaagaggtgttttatgtggttgcctggcaaccaagaaatgagagacaatccacaaagaggaactgctatggttagcttcttattggattcccatcttcctccaggtatcgccagacacctgcatgctgtgattaggtactcagtggccatcatcctctttaccatccttcccttctttctccttcatcgctggtgctccaaaaaaaaagtaagcctcacgaagcagaggccagagaactcagggccctgtgcggaagcaggatgggagcacgcaggtgtgtgttcctcactggcaggaaagtctctggcccaaggcaggagccagaggcagagctttctagagagagcaccagacaccctgcccctgccttcagctcacagaccgttgcctgattgtgaactgtatcctcacgtcccctgcagccactcacatccaggagaagattccatgacaggcagaaagtgggagatagaatcaatgggatgggaactgacagctattcatggaatggggtcttgcactcagagagatggaatgtctgagtctggctgttggcagctgagggacctcaggcacctatggcctccccctgtgtgttggtatctgttcatgaaatgaggacccagaagtgccctcccagctgttttgattgcttccgtctcctacagatgctgctgtaatgaaccaagagcctgcgggacacagaacagtgaacagggaggtaggtcctcctagcccagcctcatggatacagtcttattccgaaatagtcctgaaaaatgtgaacaccctccctcactcaggatttccctctctccaggactctgatgaacaagaccctcaggaggtgacatacgcacagttggatcactgcattttcacacagagaaaaatcactggcccttctcagaggagcaagagaccctcaacagataccagcgtgtgtatagaacttccaaatgctgagcccagagcgttgtctcctgcccatgagcaccacagtcaggccttgatgggatcttctagggagacaacagccctgtctcaaacccagcttgccagctctaatgtaccagcagctggaatctgaaggcgtgagtctccatcttagagcatcactcttcctcacaccacaaatctggtgcctgtctcttgcttaccaatgtctaaggtccccactgcctgctgcagagaaaacacactcctttgcttagcccacaattctctatttcacttgacccctgcccacctctccaacctaactggcttacttcctagtctacttgaggctgcaatcacactgaggaactcacaattccaaacatacaagaggctctctcttaacacggcacttagacacgtgctgttccaccttccctcgtgctgttccacctttcctcagactatttttcagccttctggcatcagcaaaccttataaaatttttttgatttcagtgtagttctctcctcttcaaataaacatgtctgccttcattctttaggtgactctttttttggctgaaagtttccagtgttatcattaccatgtccaaataactccaactgttctccactgggttctcacccctggacttggagcttctggaagcagggtggagcctgatttgtctctgagactccaatttccatccaaagatgcagcacataagaggttccaaggatcgtgaatcacatgaacaagtgatattcttactctctgcagacctggaaagctggcagagtcattccatgatgaaacatttgtagagtcataggccttgttagtctcatctccacggggacacatatcaacacatcatctttcatactataaatatacagtcggtcctctgtatctgtgggatttacaggtgtttattgaaccaaatataaatcaaaaatattcagagaaaaaatccacaaagtttcaaaaagcaaaactatgttgaatggacacaaatgaagctgtgtgtaggctgtatcaggaattataaataatcaagggatgatttcatgtacacaggaggatgtgcatgggttatttgcaaatgctgtgccatttcatgtaagaggcttgagcgtctgcagattgtgctatctgagtggagatcctgaaaccaatcacccacgaatagtgagggatgactgtatataatttttatttctcaattttaaatataaaacataaaaaaattacaataacaagataaaataaacaagtgttttatagtgtgagaatacgtttagatatatttttctctatgtgtaacccttgggcccatgttatttattgagaagacattctattccaccttaaaccacatggcagcctttgtcaactataaagggactgtgtgtacacggatgtattttagacactgttttctgctcagtggctctctctctgtccactctcttgagaatgctgcattttatgcagccttatacaacccctaaaatttggtagctggagtcctctagttatttattataggctatttgctatgctttttttatttttcttgaggcagagtctcgctctgttgcccaggctggagtgcagtggcacgatctcggctcactgcaacttccgcctcccaggttcaagggattccgtgcctcagcctcttgaatagctggcattacaagtgcctgctaccaggcatggctaatttttgtatttttagcagagacatggtttcactatattggccaggctggtctcaaactcctgacctcggttgatcactcacctcggcttccaaagtgctggggaaattgattttctatagcattatgttactggatatttctgtaaaatttaaaatgagggaggcagagagacagagagagagcaaaccatgagttggaactctggaatcttgggacatgagacaaattctagataaatctacaaaaatccagaatttacatgttgtgatttttgctgataaagtacaattctaagattgtaaataattgcataatccttccctgggagtttaaatcatttgaactggttctgctgtaatactagaaatacaatcatgaaaaattctaatggtttattgtcacaattgctctgaaaaccttaataatacctattagatattttgcatattacacaggaagaagagtttgaatctcagataaaaacaataaaaatacatgaaaagtctttcatgttagcacagattttaggcatctcgtgttcgggaggttggatctgagacgtgttttgagttggtcatagtgaaggacgcgaggtgtcaattctagtgagagcaatttccaggaagccatgttccgctcttgagcgagcacccactgggcctcatgcaaggtagaaagagcctgcgtacgtcaccctcccatgatgtggtcaacatgtaaactgcatgggcagggcgccaaataacatcctgtgcgctgctgagctgagctggggcgcagccgcctgtctgcaccggcagcaccatgtcgctcatggtcgtcagcatggcgtgtgttggtgagtcctggaagggaatcgagggagggagtgcggggatggagatctggacctggaggtaaagatatgggcctagaggtggagttatgggcctagaggtggagttatgggcctgaagtggagatctgggcctggagtggagatctgggcctggagtggagataggggcctggggtggagatatgtgcctggagtggagatctgggcctggagtggagatatgggcctggggtggagatatgtgcctggggtggagagatgggcctggaggggagatatgggcctggaggggagatgtgggcctagaggtggagtgatgggcctagaagtggagcgatgggcctggagtggagatatgggcctggaggtggagttatgggcctgcagtagagatatgggcctgaagtggagatatgggcctggagtggagatatgggcctagaggtggagttatgggcccggaggtggagttaagggcatgaagtggagatctgggcctggagtggagatatgatcctggagtggagatatgggcctggggtggagatacgggcctggagcagacatacaagcctggaaaggagatatgggcctggagaggagatagaagcctggagtggaaatatgggcctggagtggagatatgagcctggagtggatatatgagcctggagttgagataggagcctggagtggagatatgggcctggagtggacttaccagcctggagaggagatatgggcctggagtggagatacggacctggagtggagatctgggcctgttgtgtagatctaggcctggaggtagagatctgggcctggaggctcagtctctgcacagccgagatccttgttcctgggggcaggtaggcagcgagggtgagtttaccttcagcccagcaagggcctggctgccaagacgcacagcccagtgggggcagcagggtgccctggtttgcctgcagagggatggtccatcatgatctttctttctagggttgttcttggtccagagggccggtccacacatgggtgagtccttccccaaaccttagggtgtcatctccccacataagaggattttcctgaaatgggagggaagtcctgtcggggagtctctcatacactaggaagaggggaccctcggatgctcggcccacatttctgaccttgccttccccggcctttcattccctttcctgagtcaagctctgtgaagactggggtgagactagggtgctccaagatgggtgtgcagggaggaagtggtgtcagcagcagagaaagagagggaagcagtgctaggaacagcaggtcctctgaggacaaaggtgtaactcacaccctccagcgtttccgtgatggtaggggctgcagtgtggctgcggtctttctaccagaaaaggtgaggaaaccacagccatggccctgacattccaaatcctctgatgggggctcagttcatcaattggctgatattccattcacataggacttgccctccatgccgtgtctactttgtgttgttttatatgagtaattttgcagtattaaaatctagtaagagttgcttctccagcaacttgctcaaagttctcagctgacacttgttgtagggagacgccaagtctatgcaggatgggtccttcctgtagccctgggcacccaggtgtggtaggagccttagaaagtggaaatggggagaatcttctgggcactgggagtgaggggcggctccacatcctcctctctaaggcagtgcctccttctcccccaggtggtcaggacaaacccttcctgtctgcctggcccagcgctgtggtgcctcgaggaggacacgtgactcttcggtgtcactatcgtcataggtttaacaatttcatgctatacaaagaagacagaatccacattcccatcttccatggcagaatattccaggagagcttcaacatgagccctgtgaccacagcacatgcagggaactacacatgtcggggttcacacccacactcccccactgggtggtcggcacccagcaaccccgtggtgatcatggtcacaggtcagaggctttccgtctgggcttctcactgtcccacctcctgaatcccagagcttctggtgggggtgtccgtcagggtcccatcacccaggccctgactgtatttggggtcaagggagattgaatacaggggaaatgggtgctgtggtgggaagaatcactgtccccaatgatggctacattgtaatccctggagcctgtgactatttatgttacagggcaggggactgaaggggaaggtggagctcaggttgttgatgagttgaccttgagatggggagacagcctggactgtcccactgggctcagtgtaatcacaagggtccacatgagaggtggaggaagaggggagtggggattagagcagtgtagtgggagggagacgctatcagccactgcgggctttgaaggtggaggaagaccactagtcacagaatgcaggtggcctctaagggctggagaagtcaagagaactgattcgctgattctccagagggaacgcagccctgtagacaccttgatttcagcacagggagaactggatccaatttctgtctccagaagtggaaggggtcagtgtgttctctcccgctgccatgtttgtggtaattttctgcagcagcaacaggaaaccaacacaggaacccaggtcaaggacaagttaggaaaccaaacaaggatagccagatgtggtggtgggcacgagtaatccaacgactggggaggctgaggcaagagaatcacttgaactggggatttgttcaaaagagattgattcaggctgctaagagcctggacatgcagcctgtcctcttccacccccacatagacagcaggaaagagattagtgggaaacagatacaacagcccaagagatgaggctgtcttcacagtggcaagggagtcaggggctactggagacagagggacagagaagagggaggaagacagatggaggcacctgcaccaggggatatgggcacagaaaagacacggagatgcagagagggaggagagagacagacacggggaggggaaccctcactcattccaggtgccatggatgggatgataaagagagatgccttctaaactcacaacttctctttctaggaaaccacagaaaaccttccctcctggcccacccaggtcccctggtgaaatcaggagagagagtcatcctgcaatgttggtcagatatcatgtttgagcacttctttctgcacaaagaggggatctctaaggacccctcacgcctcgttggacagatccatgatggggtctccaaggccaatttctccatcggtcccatgatgcttgcccttgcagggacctacagatgctacggttctgttactcacaccccctatcagttgtcagctcccagtgatcccctggacatcgtggtcacaggtgagagtgtctagacattgttctcattgtcactgggacacagagtgaatgatccaggacttggaacccccaggtggtcatgaggaagataagtgtgggattcttatggaaagagagtgacttggtgaggtctgtaccaacagagacagagaaacaggagacataagtacagaacaggtgtcataacagaggacagacacaggggccatacagggaggtagaaaagagagaaagaggtaaaggagacactcagacagacagacatgtcccagagagaggtgtccttccatgctgactttgctcagagacctggcacaggttagaagtttcatttctgttttacctccacaaagtgttcctaccagaagaacccaaggacacccatatttctgacctgagttgggccctgtggcctcaggccttgtgccacctacagatgccgtgtttattctgacacctctgccttccatgcaatggagagtaatcatcccaggatatcatggcccctgaacaccaacccctgtatgctgtgtgaacttggggtccccagactggattctgaggctcatattccaaataatcccacatatgataggatcgctgagagacacagagaaaaatcagggacaccaaaaagcaaagacataaacacacacaaaatgagccagaagaaggagattaagagattcacagacacataaaaagaaagaaaagagggcagaatggagagaatgatggaaaggaggagagaaaagccccaaaatcagaaccctgagggagggacacaaagacagagaaagataaatatgtggggatggattgcagagattccaaatagaactagagagactgagaggcagagaaagacaaggagacggagagagagagatgatagatggatagatagacgtagatagatgataaataggtagatgatagataatggattggttatagatacatagatgatgactgatagatgatacatagagatgacgatgatgatgatagacacatagatatatacatagatgatacataaatagagacagagaggcagacagagaggtaatagagagagagatagatgatacatatatagataatagatgattgatggatagatagacagacagacaattgatagagagatagataagtgatacataaatatagatgatagataatttgtagatagacacaaaatagataaatagatagaaatgtgcagaaagttatgaacaagacagaaagtgagagactcaaaattaaagaaaaaggaagatcaagtcaaccaatccaaggagggtcagagagaataaaacaatccaaaaagggaaaacatacctcagggtggggaagtgaggtcatagacctagagagacagaaaaggtagaaggaggaaacagatatgaagagagatggggtggagggtgagagagagagagagagcattaggtcatagagcaggggagtgagttctcagctcaggtatgaggggagctatgacaaggaagaacctccctgaggaaactgcctcttctccttccaggtccatatgagaaaccttctctctcagcccagccgggccccaaggttcaggcaggagagagcgtgaccttgtcctgtagctcccggagctcctatgacatgtaccatctatccagggaggggggagcccatgaacgtaggctccctgcagtgcgcaaggtcaacagaacattccaggcagatttccctctgggccctgccacccacggagggacctacagatgcttcggctctttccgtcactctccctacgagtggtcagacccgagtgacccactgcttgtttctgtcacaggtgagaaaagcccatatctctctcatgtcctatgatcctaaatccttagctaaggagcttcctgctgatgatggagaaaagcatggacagatgcagagagaagacacagcaggtgtgagggcggagtcagggcgcaggatggcagacagggcacctccaaaccctccttcatggcctgcatggaggcctccgatcagggctccaggcacccaggcagatggagaaagcggtcaggacagacccagagaaggggagactgggcttagtttggggagatcagaggttccctcagcccctcaatcttatccatttcccagaagcccatcatggcctctcacccacacagagagatatcatcaccagcaacccctacacccttttcttttcattttcaaaaatatttattgaggttaaatgtaactatataatttaccacctttaccatttttaaaagtaaaatctagtggtcataaatacctttatatgctgggtgtggtggttcacggttgtaatctcggcgctttgagaggccaaggaaggtggatcatttaagatcaggaactcgagatcaccctggccaacatgtgggaaattcatctttactaaacagacaagaaaaattagccgagcatgctggcatgcacctgtagtcctagctacttgggaggctgaggcaggagaagcacttaaacccaggaggcagaggttgcactgagccgagatcatgccactgcactgcagcctgggagacagagagagactctgtttctaaataaataaatacatctatattcttttttttgttaccctccacccttcccttcctggcctctggtgtccaccattgtattctccaccttcatgagatccaccttttatctcctgcatgtgggtgagaaatgggaatctttgtaatgacctccagttccatccatgtggctgcaaatgacaggatgttattgtttctatggatgagtagtctccactgtgtgtgtgtaccacagttctctatccattcacccactgatgggcaggtaggttgactccacatcttggctactgtgaacagtgctggaacagtcatatgagtgcagatatcacttcgatacactgatgtcctttcctttggatataaacccagtagtgaaattgctggacactatgaaagttctctttttttttttttcttttttgagaaagagtttccctccttagtccaagctggagtctaagtggtgagatcttggctcattgcaacctgtgcctcctaggttcaaatgattgtcctgactcagcctccctagtagctgtgattacaggtgcacgccaccatgcctggctaatttttgtatttttttagcacagacgggatatcccaattttgggcaggctgctctcaaactcctgacctcaagtgaggtgcctgcctcggtttcccaaagtgctgaagttacaggcataagccactatgcccagcctccttttagttttttaaagaatttccatacttttctccataatagttgtactaatttacattcctaccaacagggtaccagggttctcctttctctaccatcttgccagcatttgttttgcctgtcttgcagtaaaagccattttactttactttattttatttatttatttatgttgagatggagtttcactcatagtctcccaggctggagtgcaagggtgtgatctcagctcactgcaacctccgcctcccgcgttcaactgattctcctgcctcagcctccaaagtagctgggattacaggcatgtgccaccacgcctagctaatttttgtatgtttagtagagagggagtttctccatgatggtcaggctggtctcccgacctcaggtgatccgcccacctccgcctcctgaagtgccggaattacaggcgtgagccaccggcctaaaaggcattttaatgggatgagatgaaaactcatcgcgattgtaatttacatttctctgatgatgagtgatgccgagtactttttcatatacgtgatcgccatttctatgttttgtttgtggagaaatgtctcctcatgtcttttgctcgttttttaattaaattgttttattgagttgtttgagcttcttatatttccagttattaatcccgtctcagatgaatagtttgcaaatatttgctcctattttgtcggttgtctcttcactttcttggtttatcttttgtggtgcagaagttgcttggtttgatgtaatcctaatggtctattttttgctttgattacttgtgttttgaaggttttaaacaaaatgtctttcgtcagacaaatgtcttccccattattttcttctacatgtttcataggttcaggccttagactcatgtttttaatccattttcatttgatttttgtgtatggtgacaggtatagatgcagttttattcctctgcatgtagatatccagttttccccacaccatttattgaaaagactgtcctttcctgattgtaagttctcggcacct[134 bp omitted]tctactaaaaatacaaaaattagctgagcatggtgaccagtgcctgtaataccactactcgggtgtttgaggcaagagaattgcttgaatccaggaagtggaggttgcattgagctgagattgcacctctgcactccagcctgcatgacagagcaagattctatcacacacacacacaaaaaaagccattggatgtaaatgcatggattatatctgtgttctccattctgtttcattttttatgtgcctttctttatgccaatgtcatgctgttttgcttactacagctctgtaacatatttctaagtcaggtagtgtgatgctcctgttttctctttataccttcaagtctcaagacagtgggcatcgcacacaaaaattatggagaagaggatcccaagactcccagggtccaacattagataacagagtgttggccatgaaccaacctcaaagatttccattgagtagaggacaagcaccctcatttcctcacatctctcctgtcccatgttctaggaaacccttcaagtagttggccttcacccacagaaccaagctccaaatctggtgagtaaaggacccctcttatctctgcttttggaaacctggggaggtggaagccttggatgcaagtgttggctcaaacctcccagctctgtgaatgagggcctgtcttccaccatctctgaactccagacactccaacagtgaaagggatctagggccaccaaagggctcagcgaagtctcttaacctttaatgtcctgcaggtgagacctcctacaagctagaagaatgattgccaatctgacatccttctcaggaaacatgcagtgttttttcttcctgcattcctaactggaggataaattcctggggacttgagagagggaagggaagggaacatctgatgagggcgaggtgttttagagaagttccacttgccaaggaatgaattactgttggtcatgaagcaaccctggctgactcagcagagcaagagccttgccgtaacagagaacagagctcatgcacgcacacttcgactcactgactcattcagccacggccccatgctcaggctgtgcagttggaatcctttcctattgttgccataacaaatttccacaagattcgtgggtgaaaacaaaacggttttttaattatcttacagtgctgtagctcaaagtaggaagtgcatcttactgggctaaaatcaaggtgacagcaaggctgccttccctctgaggattccaggcaagaatctgcttctcacttgtcccagcttctaaaggctcccagttccttggctcctggtccccttcctccttcctcaaagcccacaaagactggtcacatctcacatggcatcactcagacccttcttccttaccacacctctttctctgaatgctgctctcccttcttccttatcttttgaaaacttggggattctattgggttcaccaagatgaaaatccatcataatctcccggaaatcattcaggatacccttgttttaagttcagctgactagcaaccgtaattccatctgcaatcttcattccttctttccatgtaaaataagatattcacaagctatggaggccaggacagggacattttggggtgggacagcattctcctgccttccacgaacggtgaacaagatgcatttggcctctgctcttgggacactgatattgcagatggttaaatgggaggacagaaaatgagtgcacaagtggaccaataaatgaatgatccattgggaagcatctgtgcatgaaatctatttgtttgttcgttcatttatttattgagacagagtctccctctgtcttccaggctacagtgcagtgtcacgatcttggctcactgcaacctgcgtctcctggatccaagtgattctcctgcctcaccctctcgagtagctgggattacaggcaactgccaccatgcccggctaattctttttgtatattttttgtagagaggatgtttcaccatgttggccaagcttgtctgaaactcccaacctcaagtgatccgaccatctcagcaacccaaagtactgggattacaggcgtgagccactttgcccagccagaattcaaaataaataatagataatgctgagtgtataattttgggtgacagagaaggtctcactaatcagatatttgtgacattaatgaaaaacacggattgaacccctgaaagattggcggaaggattttccacacacagctgtcagccgtgaaggcagaaagctgaaaacaatctgatgtggaaggaagaggctctgcctgaaatgctgggaatgaggtggggagaatgacaagacgactgtggagagacggagagcacactgggtacacaggaaactaaggagcaacaaggagtgtgtgtttgacactcacagccattggattcacctcggggtagccaggaatccctacatgattaatagtgactgacatgaaaataagggaggcccaggtgcgtaactggaatctaggagacagtggaaaaggcaattgccgccccactggtgaaatgtggtgctgatttagaccctaagtggatgaagcagatggatataagctatgtttgggaggtagaatcatttgcagggagggcttgctgggtttgagtttcctagttgtttaatccttgctaaattaatttctttctgagatttattcctcctacacataaatcaatacctggcaaaggagtgacagatatatgaggggtggtggaaatgaagggacctattatagcatagtatacaagtctgtgaacggtggctcactcctgtaacccagcactgcaggaggctaaggccagtggattccaagaagtcaggagttcgagaccagcctggccaacatggagaaaccctatctctacatggtgaaaccctatctctcctaaaaatacaaaaattagccgagcatggtggtgcatccctgtaatcccagctcctgctctggaggatgaagcaggagaatgacttcaacccaggaggtggaggttgcagtgagtggagatcgcatcactgcactccagcctgggtgacacaaggagactccatctcaaaaaataaaaataagaaatgcataaatataataaaacacacacgaatgacaaaggcacctgaattcccatcatcatttttctatttctctataattacttctttgatcctttatcttatccattaggcaatcagcctaaaacctcttccgtatttggctttctgtgagcatgagatcatatagaaaatgtgaaagcccgctgaatcctccagcacaaatcctggaatagagaaagtgctctggtcatcacaaaaaaaacttgccccctcacccaaatcccccatctcacccctacttccaatcacctgtggaaatacagatagatcatggggaggtaaatgctaatactccttggagtgagtccagatcttggaatcagagatcagtgccagcactagctcctgctcccctttcctactaattcacaggaggacaggtggtattgaagcaatagatagtcgagggggtggtccttcccccagcctctgaggtagaacagcagcctaacatgtgtctcccgagatcacaaagagtagcacatttcacacgggcttcaacactattttctggctgtttgacataagagaattctacttcgctttttttatattgatttcacttttgtttccttttcttggagaatgcaagttgtttaactcaagaatgccgtggatgtagaaatcctaaagcacattcgctgtgtatcaatcccagtccagtcttcccagagaagactctaaacacctcctggactgcacctgggcctatgccaattcctatcactcaccgtcactccagggagacagaacacacagagaatacgttacataggcaggttcattactaacagataagcagcgagtgacaacagaagcctacatttcaatgtgagccagttccccaaggctcagaaaagctgctcgagacatgtggagtcaccccatttgcagtgtagctgggggaagccagaaagcagcccagcctgggttttgtaccctggagccacaggaagcactcagctaaagcactgcatgacgtcctcctccaggaagaacaggaagacagcccaggctgttctgggacaatcctcctgatctcaggactttgctgtcttagtccatttttgttgctctaaaggaacacttgagcctgggtaacttctaaagaagagattggtttgcctcaccgttctgcaggctgtactggaagcatggcaccagcatctatttcttatgatggcctcaggccgctcccactctggcagaagggaaggagggtctgtctgtgcagagaccacagagatcacacggcaagagagggagcaagggggagggggagcaatggagcttccaagctctttttaacaaccagctctccaggaactaatagagagggaacttgctaaccccgtctccttgggacagcattgatctgttcatgatggatccacctccatgacccaaacacctcccaagaggcccaacctcccacactgggggttaaatttcaatgtgaggtttgaaggggtcaaacatctcaactaaagtagttgtatcctcagcacgttccatggttactatgagagctataactgagaaagcaggaggaagctagatctcccgccatctgggtgcttgtccgaaagagatgctgtaagtggttacctgtcaatcaagaaatgcaagacaattcatatagagaaactgctatgattagcttcttactggtgtctcctcttcttccaggtaaccccagacacctgcacattctgattgggacctcagtggtcatcatcctcttcatcctcctcctcttctttctccttcatctctggtgctccaacaaaaaaagtaagtctcacggggcacaggccagagagctcagggccatgtggggaagcaggatgggagcacacagctgtgtgttcctcactggcaggatggtccctggcccaagacaggagccacagaggcaggactttctagagagagcaccagactccctgcccctgccttcagctcacagaccgttgcctgattctgaactgtatcctcatgtcccctgcagccactcacatccaggagaaggttccatgacaggcagaaagtgggagacagaatcaatgggatgggaactcagagctattcatgggatgggtccttgagctcagagagatagaatgtctgagtctgctgttggcaactgagggacctcaggcacctatggcctccccctgtttgttggtatctgcttatgaaatgaggacccagaagtgccctccgagctcttttgttgacttccgtctcctacagatgctgctgtaatggaccaagagcctgcagggaacagaacagccaacagcgaggtaggtgctcctcggcccagcctcgtggctagtgttattcccaaacagtcctggaaaacgtgagcaccctccctcactcagcatttccctccctcactcagcatttccctctctccaggactctgatgaacaagaccctgaggaggtgacatacgcacagttggatcactgcgttttcacacagagaaaaatcactcgcccttctcagaggcccaagacaccccctacagataccatcttgtacacggaacttccaaatgctaagcccagatccaaagttgtctcctgcccatgagcaccacagtcaggccttgaggacgtcttctagggagacaacagccctgtctcaaaaccgagttgccagctcccatgtaccagcagctggaatctgaaggcgtgagtcttcatcttagggcatcgctcctcctcacgccacaaatctggtgcctctctcttgcttacaaatgtctaggtccccactgcctgctggaaagaaaacacactcctttgcttagcccacagttctccatttcacttgacccctgcccacctctccaacctaactggcttacttcctagtctacttgaggctgcaatcacactgaggaactcacaattccaaacatacaagaggctccctcttgacgtggcacttacccacgtgctgttccaccttccctcatgctgtttcacctttcttcggactattttccagccttctgtcagcagtgaaacttataaaattttttgtgatttcaatgtagctgtctcctcttcaaataaacatgtctgccctcattgcttcaggtaatgtgacactgtattcgctgaaagaaaccgctgttatcattaccatgtccacataaccccatctgttctccgctgggttctcacccctggactctgagcttctggaagcagggtggagcctcatttgtctctgggactccaatttccatccaaagatgcagcacataggaggttccaaggatcgtgaatcacatgaacaagtgatattcttactctctgcaacctggaaagctggcagagtcattccacgatgaaacatttgtagagtcataagccttgctagtctcatctccacggggacacatatcaacacatcatatttcatactataaatatacagtcgctcctccatatctgtggggtttacaggtgtttattgaaccaagtgtaaatcaaaaatattcagagaaaatgtccacaaagtttcaaaatgcaaaactatgttgaatggacacaaatgaggcagtgtgtaggctgtatcaggaattataagtaatcaagagatgatttcatgtatacaggaggatgtgcatgggttatatccaaatgctgtgtcattttatgtaagaggcttgagcatctgcagattttggtacctgagtggagatcctgaaaccaatcacccacgaatagtaaaggatgaccgtatatgacttttatttctcaattttaaatataaatcataaaaaatgtacaataactagataaaaagtaagaagtgtttttatagtgtgagaataagtttagatttattttttcctacgtgtaaccctttggtttaatattatttattaagaagacattctatgccaccttaaaccacacggcagcctttgtcaactctaaagggactgtgtgtacacggatgtattttagacactgtttctgctaaggggctctctgtgtccacactcttgaggatgctgcacttcatgtagccttataaaaccctttaaatttagtagccagagccctctaatttgttattataggctacttgctatttttttttcttgaggcggagtcttgctctgtcgcccaggcgggactgtagtggagcaatctcagctcactgcaacttccgcctcccaggttcaggcgattctcgtgcctcagtctcttgagtagctggcgtttcaggtgcctgccaccaggcatggctaatttttgaatttttagcagagacgcggtttcactgtgttggccaggctgctctcaatctcctcatctcagttgatccgcccacctcggcttcccgacctgctgggggaaacttgattttctatagcattatgttactggatatttctgtaaaatttaaaatgagggaggcagagagacagagagagagcaaactccagagttgggactctggaatcttgagtcatgagacaaattatagataaaactacaaaaatccagaatttacatgtgtggtttttgctgataaagtacaattctaagattgtaaataattgcataatccttccctgggaatttaaatcatttgaactggttctgctgtaatactagaaatacaagcatgaacaattctaatggtttattagtcacaatgactctgaaaacactaataatacctattagatattttgcatattacacaggaagaagagttcgaatctcagataaaaacaataaaaattcatgaaaagtctttcatgttagcacagattttaggcatctcatgtttgggaggttggatctaagacatgttttgagttggtcatagtgaaggacgcgaggtgtcaattctagtgagagcaatttccaggaagccatgttctgctcttgagcgagcacccactgggcctcatgcaaggtagaaaaagcctgcgtacgtcaccctcccatgatgtggtcaacatgtaaactgcatgggcagggcgccaaataacatcctgtgcgctgctgagctgagctggggcgcggccgcctgtctgcaccggcagcaccatgtcgctcatggtcatcatcatggcgtgtgttggtgagtcctggaagggaatagagggagggagcgtggggatggagatctgggcccagaggtggagatatgggcctggaggtggagttatgggcctggagtggagatctgggcctagagatggagtgatgagcctagaagtggagatctgcgcctggagtggagatctgggcctggagtgaagatctgggcctggagtggagatatgggcctggagtggggataggaacctggagtggagagaggaacctggaggagagataggaacctggaggggaggtaggagcctagggtggagatatgggactggagtggagatatgggactggagtggagatatgggcctggagtggagttatgggcctggagtgaagttatgggcctggaggtggagatacgggcctggagtggagatatgagcctggagtggagatatggtcctggagtggagatatgggcctggagtggagatatgggtctgcagtggagttatgggcctggagtgaagttatgggcctggaggtggagatatgggcctggagtggagatatgggactagagtggagataggggcctggaggtggagatctgggcctggagtggagatctgggcctggagtggagatctgggcctggagtggagatatgggcctggagtggagatatgggtctgcagtggagatatgggcctggaggtggagatatgggcctggagtggagttatgggcctggagtgaagttatgggcctggaggtggagatatgggcctggagtggagatatgggactagagtggagataggggcctggaggtggagatctgggcctggagtggagatatggccctggagtggagatatgggcctggagtggagatatgagcctggagtggagatatggccctggagtggagatatgggcctggaggtggagatatgggcctggagtggagttatgggcctggagtgaagttatgggcctggaggtggagatatgggcctggagtggagatatgggactagagtggagatacgggcctggaggtggagatctgggcctggagtggagatatggccctggagtggagatatgggcctggagtggagatatgagcctggagtggagatatggccctggagtggagatatgggcctggagtggagatatgagcctggagtggagatatggccctggagtggagatatgggcctggagtggagatatgggcctggagtggacatatgggtctggagtggagatacgggcctggaggtggagatatgggcctggagtggagatatgggcctggaggtggtgatatgggcctggagtgtagacatgggccgagtggagatatgggtctggagtggagatatgggcctggagtggagatatgggactggagtggagatataggcatggggtggagacatgggccgggagtggagatatgggactggagtggagatacgggcgtggggtggagatatgtgcctggaggtggagatatgggcgtgggttggagatatgggcctggagtggagatatgggcgtggggtggagatatggatctggagtggagacatgggcatggggtggagatatgggcctggtgtgtagatatgggcctggagtggagatatggccctggagtggagatatgggcctggagtggagatctgggcctacggtggagatatgggcctaggatggggatatgggcctggaatggagatatgggcctgggtgtggagatatgggactggagtggagatatgggcctgatgtggagatatgggcttggagtggagatatgatcctggagtgtagttatgggcctggaggtggagatctgggcctggggtggagatatgggcctggagtggagatatgggactggagaggagatatgggactggagtggagatatgggcctggagtggagatatgggcctggattggagatatgggccgagggtggagatctgagcctggattggagatgtgggcccggattggctatatgggtctagggtggaaatatcggcctggagtggagatatgggcctggagtggagatatgggcttggggtggggatatgggcctggaggctgggtctctgcacagccgagagcactgttcttgggtgcaggtaggctctgatggtgagtttcccttcggcccaggaaggggctggctatcaagactcacagcccagtgggggcagcaaggaaggccttgtttgcctgcaaatggatcttccatcatgatctttctttccagggttcttcttgctgcagggggcctggccacaggagggtaagtccttctccaaaccttagggtgtcatctccccacataagaggattttcctgaaacgggagggaagtcctgtcagggagtctctcataaactaggaagaggggaccctggggtgctcggcccacagttccgaccttgcctccctggcctctcaaccccttggcagagtcaagttgtgtggggaccagggttggactagggtgttcaaagctgggttgtgtggtggggaagtggtaggaacagcagatcctctgaggacaaaggtgttactcacacacttcagcgtttccatgacggtaggggctgcagtgtggctgctgtcattctaccagaagaggtgggaaaccacagccatggccctgacattccaaatcctctgatgggggctaagttttttattttcattcaggcaactgctgatattccattctcaaaggacatgccctccacttcatgtctaccctgtgttgttttatgtcagtaatcttacagtattaaaatctagtaggagtctcttactcagcacttgctcaaagttctcagctgacacttttgttgtacggagacaccttgtctttgtgggatgggtccttcctttagccctaggcaccaaggtgtgatagcagccatagaaatgtggaaagtggggagaatcttctgagcacagggagggaggcacagctccacatcctcctctctaaggcggcgcctccttcaccccaaggtggtcaggacaagcccttgctttctacctggcccagccttgtggtgcctccagaacatgtgactcttcagtgtcactctaatcttgggtttaacaacttcagtctgtacaaggatgatggggtgcctgtccctgagctgtacaacagaatattctggaaaagccttttcatgggccctgtgaccacgtcacatgcagggacctatacatgccggggttcacacacacactcccccagtgggtggtcggcacccagcaaccccctggtgatcgtggtcacaggtcagagggctcctgtctgggattctccttgtcccacctcctgaatcccagagcttctggtaggcatgtccttgagggtcccatcacgcaggccctaactgtatttggggtaaagggggattgaatacagggaaatgggtgctgtggtgggaagaataagtgtccccagtgatgactgcattctaatccctggagtctgtgactatttatgttataggggaagggactgaaggggaagatggagctcaggttgttgatgagttgaccttgagatggggagacagcctggactgtcccggtgggctcagtataatcacaagtgtccacatgaaaggaggaggaagaggagagtggggattagagcagcgtagtgggagactccatcagctttgaaggtggatgaaggccataagccatgaatgcaggtggcctatagaggctgggaaagtcaagtaactgattctcctgagtctccagagggaacacagccctgcagatgccttgattttagccctcgaaaaacagggtccgctttctgtctccagaatcggagggggtcagtgtgctctctcctgctgccatgcttctgataattttctacagcagcaacaggaaaccaacactggaacccaggtcaaggacaagttaagaaaagacacaaggatagccaggcatggtggcaggtgcatgtaatcctagcgactcgggaggctgagagcaggagaatcgcttgaacccaggagacagaggttgcagtgagcgtagaccacaccacttcactccagcctgggtgaaggagtgagactctgtctccaaaattaattaattaattaaagaaaccaaacaaagagaaggttggctacaccgagatcagcaagggtgggatgatgatgccaccaccaggctccatccacatagggaggggttgatactcctcaaatcagcacgaggagccagcctatggaaactggcaccatggagaaggcacagacatggcaagagtggctcccagtccccaccaggaacagggtgtgtggacactggtgcctgccttactgatcagttcatacctcctgccaaggattccaattcgtccaaaagagattgaaccaagctgctaagagccgggacgtgcagcctatcctgcttcctcttccactcccacatagacagtaagaaagacattagtgtgaaatagatacaacagcccaagagatgaggctgagcccagtgggaagggaatcacagctactagagacagagggacagagaagagggagggagacagatggaaggacctgcaccaggagttatgggcacagaaaagaacatgaagacacagagaggaagcagagagacagacaccagcgaagggaaggctcactcattccaggtgccatggatgggatgataaagagagacaccttctaaactcacaacctctcttcctaggagtccacagaaaaccttccttcctggccctcccaggtcacctggtgaaatcagaagagacagtcatcctgcaatgttggtcggatgtcatgtttgagcacttccttctgcacagagaggggaagtttaacaacactttgcacctcattggagagcaccatgatggggtttccaaggccaacttctccattggtcccatgatgcctgtccttgcaggaacctacagatgctacggttctgttcctcactccccctatcagttgtcagctcccagtgaccctctggacatggtgatcataggtgagagtgtccagacattcttctcattgtcattgggatgcagagtgaatgatccaggacttggagacccaggtggttgtaaggaagatgagcttggtattcttatggagagagactgacttggtgaggtctgtgccaacagagacagagaaacaagagacacaagtacagaccaggtgtcataacagaggacaaacacaggggccatacagggagttagaaaagacagaaagagttaaaggagacagacagacatgtcccagacagaggtgtccttccatgctgactttgctcagagacctggcacaggttagaagtttcatttctgttttacctccacaaagtgttctctaccaggagaacccaaggacacccatatttctgacctgagttgggccctgtggcctcaggccttgtggcacctacagatgccatgcttattctgacacctctgacttccatgcaatggagaataatcgtcccaaaatatcatggccccagaacaccaacccctgtatgctgtgtgaacttgtggtctccagactggattctgaggctcacattccaaataaccccacatatcacatatgagaggatcactgagaagcacagagagaaatcagggacaccaaaaagcaaagacataaacacacagagaaagagccagaggaaggagattgagagactcacagacacataaagagagagaagagggcagagaagtggagagaatgatggaagagagcagagaaaaccactaaaattagagtcctgagggcgaggcacaagggcatagaaagatggagatgtggggatgaattgcagagattccaaagagaactagagagaccgagaggcagagcaagacagatgatagatggatagatacagatagatgatggatagatatagatagatgatatataggtagatgatagataataggttatagatacatagatgatgattgattgattcattaatagatgatacatagagatgatgatgatgaagatagatggatagataatacatagagatagagaggaagacaaagagagaaataatagagagagagagatgatacatatatatagataatagatgattgacggatagacaattgatagataaatagatgatatatagatatagatgacaggtagagaatttgtagataggcaccgaatagataaatagatggattgatagataatagatagaaatatgcagaaagttatgaacgggacacaaactgagaaactcagagttaaaaaaagtaacatcaagtcaaccaatccaaggagagccagagagaataaaacaatccaaaaacggaaaacataactagaggtagggaagtgaggtcagagacctacagagacagagaaggtggaaggaggaaatagacatgaagagagatagggtggagggtgagacagagaaagagagcattaggccatagagcaggggagtgagttctcaggtcaggtgtgaggggagctgtgacaaggaagatcccccctgaggaaactgccccttctccttccaggtctatatgagaaaccttctctctcagcccagccgggccccacggttcaggcaggagagaatgtgaccttgtcctgcagctccatctatccagggaaggggaggcccatgaacgtaggctccctgcagtgcgcagcatcaacggaacattccaggccgactttcctctgggccctgccacccacggagggacctacagatgcttcggctctttccgtgacgctccctacgagtggtcaaactcgagtgatccactgcttgtttccgtcacaggtgaggaaaccccatatctgtcccatgtcctatgatcctagagccttagctgaggagcttcctgctgatgatggagagaagcatggacagatgcagagagaagacgcagcatgcctgtgagggagggatcagggcgcaggatggcacacacagcacctccaaaccctcctgcatggcctgcatggaggcctccgattagggctccagaaacccaggcagatgtagaaagcggtcaggagagacccagagaaggggagactgggctcagtttggggagatcagaggttccctcagcccctcaaccttacccatttcccagaagcccttcctggcctctcacccacacagagatgtcatcaccagcaacccctacatccttttctttttgtttgaaaaaatattcattgaggttaaatatacctatatagcttaccacttttaacatttttttttttttgaggtggagtctagctctgtctcctatgctggaatgcagtggcacaatctcagctcactgtaacctccgcctcctgggttcaagcgattctcctgcctcagccacctgagtagctggtactacaggcgcccatcaccacgccgggctactttttgtatttttagtagagagggggtttcaccatgttggtcgagctgctctggaactcctgaccacgtgatccacccgcctcaggctcccaaagtgctgggattacaggcatgagccaccgcgcccggccacgtttaccaattttaagtgtaaggtctagtggtcataaatacatacatataaattttttgtttgtttgttttatcctccacccttttcttcctggcctctggtagccaccattctactctctatcttcatgagatccaccttttagctcctgtatatgggtgagaaatgagaatatttgtaatgacttccagttccatccatgtggctgcaaatatcaggatgttattctttctatggatgagtagtctccgctgtgcgtatgtactacattctctctatccattcatccactgatgggcaggtaggttgactccacatcttggctactgtgaagagtgctgcaccaatcatacgagtgcagatatcacttcgatacattgatttactttcctttggatataaacccagtagtgaaattgctggatactatgaaagttctctttttagtttttcgtttgttgttttgtttttgtttttgagacagtttccctctgtgcccaggctggagtacaagtgatgtgatcttggctcattgcaacctccgcctcctgggttcaaatgattttcctgcctcagcctccctagtagctgggattacaggtgcacgccaccatgccgggatactttttggttttttttagtgtacatggggtttccccaggttggctaggctgctctcaaactcatgacctcaactgaggtgcccgcctcggtctcccaaagtgccgggattacaggcatgatccacttcatccaacctctttttagttctttaaaggacttccatacttttctccgtaatggctgtactaatttacactcctaccaacagggtaccagggttctcctttctctaccaccttgccagcatttgttttgcctgtcttgcagctaaaagccattttattttatttcattttattttgagatggagtttcgctcttgtcacccaggctggagtgcagtggtgcgatctcggctcaccgcaacctccacctcccaggttcaagcgattctcctgcctcagcctcccgagtagctggaattacaggcacacgccaccacgcccgactaatttttgtatttttagtagagacagcgtttctccatgtgggtcagactggtctcaaactcccgaccttatgagattcgcccacctcgggctctcagagttctaggatgacagacgtgagccacctcgcccggcctaaaagccattttaatggggtgagatgaaaactcactttgattttaattcgcgtttctctgatgatgagtgatactgagcactttttcgtatgtggggaaatttcatgtcttttgctcctttttcaattaaatcatttgttttattgagttgtttgagcttcttatacttctagttattaatcccgtctcagatgcatagtttgcacatatttgctcccaatctgtgggttgtctcttcactttgttggtttatttttagcggtgcagaagttgcttagtttgaggtaatcccaatggtctatttttgcttcgattacttgtgttttgaaggtttaaaacaaaatgtcttccttcagacaaatgtactggagcatttccccaatattttcttctacgtgtttcacaggttcaggccttagactcacatctttaatccactttcatttgatttttgtgtatggtgacaggtagaggtgcagtttcattcctctgcatgtagatgtccaggtttccctgcactgtttattgaaaaaactgtcctttcctgattgtgagttcttggcacctttgtcaaagtccattggatgggctgggcatggtggctaacaccagcaacttcagcactttgggaggccaaggctggtggatcacctgaggacaggagtacaagattactctggccgacgtgatgaaacctcgtctccactaaaaatataaaaattagctgagcatggtggtcagcacctgtaatactactactcaggagtttgaggcaagagaattgattgaacccaggaggctgaggttgcagtgaaccgagattgcacctctgcactccagcctgggtgacagagcgagactccatctcaaaagaaaaaataaaaaaaattggatgtaaatgcatggattatatctgtgttcttcattctgctccgttgttctatgtgcctttcttcatgccaacatcatgctgttttgcttactacagctctgtaacatattttgagatcaggtagtgtgatgctcctgttttctctttataccttgaagtctcaagacagtgggcgtcacatacaaaaattatggaagaaaggatccctggactcccagggcccaatgttagataacagagtgttggccatgaaccaaactcaaagatttccactgagtagaggacagacaccctcatttcctcacctctctcctgtctcatgttctaggaaacccttcaaatagttggccttcacccactgaaccaagctccaaaaccggtgagtacaggaccctcttatatccgcttttggaaccctggggaggtggaaaccttggattcaggcgttgactcagcatctcacagctctgacattgtacgcctgtcttctaccatctccgaactccagatactccaacagcgaaagggatctgggcccaacacagggctcagtgaaatctcttcatctctcattttatggagctgagacctcctacaagctagaagaatgattgccaatctgacatccttctcaggaaaaacgcaatgtttgttctgcttgcattcctaactggaggataaattcctgggggcttgagagagggaagggaagcgaacatctgatgagggcgaggtgttttagagaagttccacttgccaaggaatgagctcctgttggtcatgaaacaaccctggctgactcagcagagcaagagccttgccgtaacagagaacagagctcatgcacgcacactttgactcactgacttattcagccacggccccatgctcaggttgtgcagtgtggaagcttttcctattgttgccataacaaatttccacaagattcgtgggtgaaaacaaaacggttatttaattatcttacagtgctctagctcaaagcatgaagtgcatctcactgggctaaaatcaagatgacagcaagcctgccttccctctgaggattccaggcaagaatctgcttctcacttgtcccatcttataaaggctcccagttccttggctgctggtccctttcctccttcctcaaaacccacaaagactggtcacatctcacatggcatcactcagacccttcttccttaccacacctctttctctgaatgctgctctcccttcttcctcatcttttgaaaacttggggattctattgggttcaccaagatgaaaatccgtcataatctcccggaaatcattcaggatacccttgttttaagttcagctgattagcaaccataattccatctgcaatcttcattcctcctttccatgtaaaataacatattcacaagctatggaggctaggacagggacattttggggtgggacagcattctcctgccttccacaaatggtgaacaagatgcatttggcctctgctcttgggacactgatattgcagatggttaaatgggaggacagaaaatgaatgcacaagtggaccaataaatgaatgatccattgggaagcatctgtgcatgaaatctatttgtttgttcgttcgtttgtttattgagacagagtctccctctgtcttccaggctacagtgcagtgtcacgatcttggctcactgcaacctgcgtctcctggatccaagtgattctcctgcctcaccctctcgagtagctgggattacaggcaactgccaccatgcccggctaattctttttgtatattttttgtagagaggatgtttcaccatgttggccaagcttgtctgaaactcccaacctcaagtgatccgaccatctcagcaacccaaagtactgggattacaggcgtgagccactttgcccagccagaattcaaaataaataatagataatgctgagtgtataattttgggtgacagagaaggtctcactaatcagatatttgtgacattaatgaaaaacacggattgaacccctgaaagattggcggaaggattttccacacacagctgtcagctgtgaaggcacaaaggtgaaaacaatctgatgttgaaggaagaggctctgcctgaaatgctgggaatgaggtggggagaatgacaagatgactgtagagagatggagagcactctgggtacacaggaaactaaggaggaacaaggagtgtgtgtttgacactcacagccattggattcacctcggggtaaccaggaatccctacatgattaatagtgactgacaagaaaataagggaggcccaggtgcgtaactggaatctaggagactgtggaaaaggcaattgccgccccactggtgaaatgtggtgctgatttagacactaaatgaatgaagtagatggatataagatatgcttgtgaggtagaatcattggctggaaaggcttgctgggtttgattttcctacttgtttaatcctcgcttaattaatttctttctgagatttattcatcctacacataaatcaatacctggcaaaggagtgacagatatatgaggggtggtggaaatgaagggacctattatagcataatatacaagtctgtgaacggtggctcatgcttgtaacccagccctgcaggaggccaaggcgggtggattccatgaagtcaggagttccagaccagcctggccaacatggtgaaaccctatctgtactaaaaatacaaaaattagccgagcatggtggtgcatccctgtaatcccagctcctactctggaggatgaagcaggagaatgacttcaacccaggaggtggaggttgcagtgagtggagattgcatcactgcactccagcctgggtgacacaaggagactccgtctcaaaaaataaaaataagaaatgcataaatataataaaacacacacgaatgacaaaggcacctgaattccaatcatcatttttctatttctctataattacttctttgatcctttatcttatccattaggcaatgagcctaaaacctcttccctatttggctttctgtgagcatgagatcacatagaaaatgtgaaagcccgctgaatcctccagcacggatcctggaatagagaaagtgctctggtcatcgcaaaaaaaaacttgcccactcacccaaatcccccacctcacccctacttccaatcacctgtggagattcagatagaccatggggaggaaacattaatactccttggagtgagtccagatcttggaatcagagatcagcgacagcactagctcctgttcccctttcctactaattcacaggaggacaggtggtattgaagcaatagatggtcgagggggtggtccttcccccagcctctcgggtagaacagcagcctaacatgtgtctcccgagatcacaaagagtagcacatttcacacgggcttcaacactatttcctggctgtttgacataagagaatcttgcttcgctatttttaatcgtgatttcacctttgtttcctttccttggtgaatgcaatttgtttgactcaagaatgctgtggatgtagaaatcctaaagcacattcgctgtgtatcaatcccagtgcagtcttcccagagaagactctaaacaaatcctggactgcacctgggcctatgccaattcctatcactcaccgtcactccagggagacagaacacacagagaatacgttacataggcaggttcattactaacagataagcagcgagtgacaacagaagcctgcatttcaatgtgagccagtccctcaaggctcagaaaagctgctcgggacatatggagtcaccccatttgcagtgtagctgcgggaagccagaaagcagcccagcctgggttttgtaccctggagccacaggaagcactcagctaaagcactgcatgacgtcctcctccaggaagaacaggaagacagcccaggctgttctgagacattcctcctgatctcaggatgttgctatcttagtccatttttgttgctctaaaggaacacttgagcctgggtaacttctaaagaaaagagattggtttgcctcacagttctgcaggctgtactggaagcatggcaccagaatctatttctcgtgacggcctcaggctgctcccactctggcagaagggaaggagggtctgtctgtgcagagaccgcagagatcacacggcaagagagagagtaagggggagagggagcgatggagcttccaagctctttttaacaaccagctctccaggaactaacagagggggaacttgctaaccccgtctccttgggacagcattgatctgttcatgatggatccacctccatgacccaaacacctctgaagaggcccaacctcccacaatgggggtgaaatttcaatgtgaggtttgaaagggtcaaacatctcaactaaagtagttgtatcctcagcacgttctatggttactatgagagctataattgagaaagcaggggaaagctaggtctcccgccatttgggtgcttgtcctaaagagacgttgtatgtggttacctgccaatcaagaaatgcgagacaattcataaagaggaactgctatgattagcttcttattggtgtctcctcttcttccaggtaaccccagacacctacatgttctgattgggacctcagtggtcaaaatccctttcaccatcctcctcttctttctccttcatcgctggtgctccgacaaaaaaagtaagtctcacgaagcagaggccagagagctcagggccatgtggggaagcaggatgggagcacgcggatgtgtgttcctcaccagcaggatggtccctggcccaagacaggagccacagaggcaggactttctagagagagcaccagattcccttcccctgccttcagctcacagaccattgcctgattctgaactgtatcctcacgtcccctgcagccactcacatccaggagaaggttccatgacaggcagaaagtgggagatagaatcaatgggatgggacctcagagctattcatgggatgggtccttgaactcagagagatagaatgtctgagtctgctgttggcaactgagggacctcaggcacctatggcctccccctgtttgttggtatctgcttatgaaatgaggacccagaagtgccctccgagctcttttgttgacttccgtcttctacagatgctgctgtaatggaccaagagcctgcagggaacagaacagtgaacagcgaggtaggtgctcctccgcccagcctcgtggctagtcttattcccaaagagtcctgaaaaatgtgagcaccctccctcactcagcatttccctctctccaggattctgatgaacaagaccatcaggaggtgtcatacgcataattggatcactgtgttttcacacagagaaaaatcactcgcccttctgagaggcccaagacacccccaacagataccagcatgtacatagaacttccaaatgctgagcccagatccaaagttgtcttctgtccacgagcaccacagtcaggccttgaggggatcttctagggagacaacagccctgtctcaaaaccgggttgccagctcccatgtaccagcagctggaatctgaaggcatcagtcttcatcttagggcatcgctcttcctcacaccacgaatctgaacatgcctctctcttgcttacaaatgtctaaggtccccactgcctgctggagagaaaacacactcctttgcttagcccacaattctccatttcacttgacccctgcccacctctccaacctaactggcttacttcctagtctacctgaggctgcaatcacactgaggaactcacaattccaaacatacaagaggctgcctcttaacacagcacttagacacgtgctgttccacctcccttcagactatctttcagccttctgccagcagtaaaacttataaattttttaaataatttcaatgtagttttcccgccttcaaataaacatgtctgccctcatggtttcggtaacgagactcttttcttgcctaaggcttccggtgttatcattaccatgtccacataaccccatctgttctccattgggttctcagccctggactctgagcttctggaagcagaatggagcctgatttgtctctgagactccaatttccatccaaagatacagcacataggaggctccaaggatcgtgaatcacatgaacaagtgatattcttactctctgcagacctggaaagctggcagagtcattccacgatgaaacatttgtagagtcataggccttgttagtctcatctccacggggacacatatcaacatatcatctttcataatataaatatacagtcggtcctccatatctgtggggtttacaggtgtttattgaaccaacaataaatcaaaaatattttcagaaaaaaatccccgaagtttcaagaagcaaaaaactatgttgaatcgacacaaattgagtggcgtgtaggctgtgtcaggaattataagtaatcaagggatgatttcatgtatacaggaggatgtgcatgggttctatgcaattgctatgctattttttttttttttttgagacagtctcactctctcacccaggctggagtgcagtggcatgatctcagctcactgcaacctccgcctcccaggttcaagcgattgtcttccctcagcctccccagtagcctcccctaggattacaggcacgtgccaccatgcacagataaatttttttgtgtgtgtatttttagtagagacggggtttcagaa[136 bp omitted]gattttggtatctgaatggggatcctggaaccaatcacccaggaatagtgaaggaccacagtatataatttttatttgtcaatcttaaaaataaagcataaaaagtttacaacaacaagataaaaaataagaagtgtctttatagtgtgaggataagtttagatttattttttcctacgtgtaaccctatggtcctgtgttatttgttgagaaaatattctattccaccttaaactacatggcagcctttgtcaactataaagggactgtgtatccacagatgtattttagacacagttttctgcccagtggttctctgtatcccctctcatgaggatgctgcatttcatataaacttatagaaccccttaaaatttggtaacctgagttctctgatttgttattataggttatttagtttgcttttttttttctttcttgagacagactcttcctctgtcacccaagctggagttcagtggcttgagctcagctcactgcagcctccgcctcccaggttcaagcaattctcgtgcctcaggtttagtactagaaactcatcaggaaaattagaatggctttttgtcacaattactctgataatgttaataatacctcttagatattttgcacattacacatgaagaaaagtttgaatctcagataaaaacaaaaatacatcaaaagtctttaatgtaagcacagaattcaatcacctcatgtgtgagaggttggatctgagacgtcttttgagtctggtcatagtgaaggatgcaaggtggcaattgtagtcacaacaatttccaggaagccatgttccgctcttgagcgagcacccactgggcctcatgcaaggtagaaagagcctgcgtacgtcaccctcccatgatgtggtcaacatgtaaactgcatgggcagggcgccaaataacatcctgtgcgctgctgagctgagctggggcgcggcctcctgtctgcaccggcagcaccatgtcgctcacggtcgtcagcatggcgtgcgttggtgagtcctggaagggaatagagggagggagagtggggatggagatctcggcctagaggtaaagatatgggcctggagtggagatatgggcctggagtggagatatgggcctgggtgtggagatatgggcctggaggtgtaaatatgggcctggagtggagatatgggcctggaggggagatatgggcctgggtgtggagatatgggcctggagtggagatacgggcctggagtggagatatgggcctggagtggagatatgggcctgcaggtggagatctgggcctggagtggagatatgggcctggagtggagatatgggtctgatgtggagatatgggcctggagtggagatatgggcctggagtggagatatgggcctagaggggagatctgggcctggagtggagatatgggtctgatgtggagatatgggcctggagtggagatatgggcctggagtggagataggggcctggagtggagatatgggcctggagtggagatctgggccaggaagtgttgatctgggcctggagcctgggtctctccacagctgagagccctgttcttggcagcaggtagcagggaggctaagtttaccttcagcccagcaagggcctggctgccaagacacacagtgcagtgggggcagcagggtgccctggtttgcctgcagttggatcgtctatcatgatctttctttccagggttcttcttgctgcagggggcctggccactcatgggtgagtccgtccccaaaccttagggtgtcatctccccacataagaggatttttctgaaacaggagggaagtcctgtcggggagtctctcataaactaggaagaggggacccttggatactcggcccacatttctgacctcgccctccctggcctttctttccctttcctgagtcaagctctgtgaagactggggtgagactggggtgctccaagctggggtgtgcagggaggaagtggtgtcagcagcagagaaagagagggaagcagtgctaggaacagcaggtcctctgaggacaaaggtataactgacaccctccagcgtttccgtgacggtaggggctgcagtgtggctgcggtctttctaccagaagaggggggaaaccacagccatggccctgacattccaaatcctctgagggggctcagttcatgaattggctgatattccattcacataggacatgccctccatgccgtgtctactttgtgttgttttatgtgagtaattttgcagtattaaaatctagtaagagtcacttattcagcacttgctcaaagttctcagctgacacttgttgtagggagacgccatgtctatgtggggtgggtccttcctgtagccctgggcacccaggtgtggtaggagccttagaaagcggaaatgggagaatcttctgagcacagggagggaggggtggctccacatcctcctctctaaggcagtgcctccttctcccccaggtggtcaggacaaacccttcctgtctgcccggcccagcactgtggtgcctcgaggaggacacgtggctcttcagtgtcactatcgtcgtgggtttaacaatttcatgctgtacaaagaagacagaagccacgttcccatcttccacggcagaatattccaggagagcttcatcatgggccctgtgaccccagcacatgcagggacctacagatgtcggggttcacgcccacactccctcactgggtggtcggcacccagcaaccccctggtgatcatggtcacaggtcagaggctttctgtctgggcttctcactgtcccacctcctgaatcccagagcttctggtgggggtgtccatcagggtcccatcacccaggccccaactgtatttggggtcaagggagattgaatacaggggaaatgggtgctgtggtgggaagaataactgtcgccaatgatggctacattgtaaaccctggagcctgtgactatttatgttatagggcaggggactgaaggggaaggtggagctcaggttgttgatgagttgaccttgagatggggagacagcctggactgtcctgctgggctcagtgtaatcacaagggtccgcgtgagaggtggaggaagaggggagtggggattagagcagtgtagtgggagggagacgctatcagccactgtgggctttgaaggtggaggaaggccactagtcacagaatgcaggtggcctctaagggctggagaagtcaagagaactgatttgctgagtctccagagggaacgcagccctgcagatgccttgatttcagcacagggagaactggatccaatttctgtccccagaagtggaaggggtcagtgtgttctctcctgctgccatgtttgtgataattttctgcagcagcaacaggaaaccgacacaggaacccaggtcaaggacaagctaggaaaccaaacaaggatagccaggtgtggtggtgggcacgagtaatccaacgactggggaggctgaggcaagataatcacttgaaccggggaggcagaggttgcagtgagccaagacaacaccactgcactccagcctgggtgaaaaagtgactgtctcaaaaataaattaattaatcaattaattaaagaaaccaaacaaggagaaggttggctaccgtgggatcagcaagggtgggatgctgatgccaccaccaggctccatccacataggaaggggttgatgctcctggaaccagcaccagggaccaccctatggaagctggggccatggagaaggcacagacatggcaggagaggctcccaatccccatcaggaacagggtgtgtggacactgatgtctgccttactgatgagttgatacctctgccagagactccaatttgttcaaaagagattgattcaggctgctgagagcctggacatgcagcctgtcctcttccacccccacatagacagcaggaaagagactagtgggaaagagatacaacagcccaagagatgaggctctcttcacagtgggaagggagtcaggggctactggagacagagggacagagaagagggaggaagacaaatggagggacctgcaccaggggatatgggcacagaaaagacacggagacacagagagggaggagagagacagacctctgggaggggaaccctcactcattccaggtgccatggatgggatgataaagagagatgccttctaaactcacaacttctctttctaggaaaccacagaaaaccttccctcctggcccacccagggcccctgctgaaatcaggagagacagtcatcctgcaatgttggtcagatgtcatgtttgagcacttctttctgcacagagaggggatctctgaggacccctcacgcctcgttggacagatccatgatggggtctccaaggccaacttctccatcggtcccttgatgcctgtccttgcaggaacctacagatgttatggttctgttcctcactccccctatcagttgtcagctcccagtgaccccctggacatcgtgatcacaggtgagagtgtccagacattcttctcattgtcattgggacacagagtgaatgatccaggacttggaacccccaggtggtcatgaggaagataagcgtgggattcttatggagagagactgactcggtgaggtctgtaccaacagagacagggaaacaggagacataagtacagaccaggtgtcataacagaggacagacacaggggccatacggggaagtagaaaagagagaaagaggtaaaggagacactcagacagacagacatgtgccagagagaagtgtccttccatgctgactttgctcagagacctggcacaggttagaagtttcatttctgttttgtctccacaaagtgcttctacgaggagaacccaaggacacccatatttctgacctgagttgggccctgtggcctcaggccttgtggcatctacagatgccatgtttattctgacacctctgccttccatgcagtggagccataattatcccaggatatcatggccccagaacaccaacccctaaatactgtgtgtacttggtgtccccagactagattctgaggctcatattccaaataatcctacatataataggatcactgagagacacagagataaatcagggacttcaaaaagcaaaggcataaacacacagagaatgagccagaggaaggggattgagagactcacagacacacaaaaagaaagaaaagagggcagaggagtggagagaatgctggaagggaggagagaaaagccccaaaatcagaaccctgagggaggggcacaaagacagagaaagataaagatgtggggatggattgcagagattccaaatagaactagagagactgagaggcagagaaagacaaggagatggagagagacagatgatagatggatagatagatatagatagatgataaataggtagatgatagataatggataggttatagatacatagatgatgattgatagatgatacatagagatgatgatgatgatgatgaagatagatagaagacacatatataaatatatagatacatagatgatacatagagactgacaggcagacagagaggtaatagagagagagagagatgatacatagatacagataatacatagatgattgatggatagacagatagacaattgatagataaatgatacatagatatagatgacagataatttgtagatagacacaaaatagatagatagataatagatagaaatatgcagaaagttatgaacaagacagaaagtgagagactcagaattatagaaaaaggaagatcaagtcaaccaatccaaggagagtcagagagaataaaacaatccaaaaagggaaagcatacccaggggtggggaagtgaggtcagagacctagagagacagagaaggcggaaggaggaaatagacatgaagagagttggggtggagggtgagagagagagagagcattaggtcatagagcaggggagtgagttctcagctcaggtatgaggggagctgtgacaaggaagaacctccctgaggaaactgcctcttctccttccaggtctatatgagaaaccttctctctcagcccagccgggccccacggttcaggcaggagagaacgtgaccttgtcctgtagctcctggagctcctatgacatctaccatctgtccagggaaggggaggcccatgaacgtaggctccgtgcagtgcccaaggtcaacagaacattccaggcagactttcctctgggccctgccacccacggagggacctacagatgcttcggctctttccgtgccctgccctgcgtgtggtcaaactcaagtgacccactgcttgtttctgtcacaggtgaggaaaacccgtgtctgtcccatgtcttatgatcctagagccatagctgaggagcttcctgccgatgatggggagaagcatggacagatgcagagagaacacgaagactgggtgtgaggggggggtcagggtgcaggatggcagacagggcacctccaaaccctcttgcatggcctgcatggaggcccatggtcagggctccaggcacccaggcagatggagaaagcggtcaggacagacccagagaaggggagactgggctcagtttggggagatcagaggttccctcagcccctcaaccttacccatttcccagaagcccatcctggcctctcacccacacagagagatgtcatcaccagcaacccctacactcttttcttttcattttcaaaaatatttattgaggttaaatgtaactatataatttaccaactttaccatttttaaaagtaaaatctagtggtcataaatacctttatatgctgggtgtggtggttcacggttgtaatcttggcgctttgagaggccaagaaaggtggatcatttaagatcagggactcgagatcagcctggccaacatgcgggaaattcatctttactaaacagacaagaaaaattagccaagcatgccggcatgcacctgtagtcctagctacttgggaggctgaggcaggagaagcacttaaagccaggaggcagaggttgcactgagccgagatcatgccactgcactgcagcctgggagacagagagagactctgtttctaaataaataaatacatctatattcttttttttgttaccttccacccttcccttcctggcctctggtatccaccattctattctctaccttcatgagatccaccttttatctcctgcatgtggtgagaaatgggaatctttgtaatgacctccagttccatccatgtggctgcaaatgacaggatgttattgtttctatggatgagtagtctccaccgtgtgtgtgtactacagttctctatccattcacccactgataggcaggtaggttgactccacatcttggctactgtgaacagtgctggaacagtcatatgagtgcagatatcacttcgatacactgatgtcctttcctttggatataaacccagtagtgaaattgctggacactatgaaagttctctttttttttttttcttttttgagaaagagtttccctccttagtccaagctggagtcaaagtggtgcgatcttggctcattgcaacctctgcttcctaggttcaaacgattctcctgactcagcctccctaatagctgtgattacaggtgcacgccaccatgcctgactaattcttgtattttttagcacagacgggatatcccaattttgggcaggctgctctcaaactcctgacctcaagtgaggtgcctgcctcggtttcccaaagtgctgaagttacaggcataagccactatgcccagcctccttttagttttttaaagattttccatacttttctccataatagttgtactaatttacattcctaccaacagggtaccagggttctcctttctctaccatcttgccagcatttgttttgcctgtcttgcagataaaagccattttactttactttatttatttatttatttatgttgagatggagtttcactcatagtcgcccaggctggagtgcaagggtgtgatctcggctcactgcaacctctgcctcccgcgttcaactgattctcctgcctcagcctccaaagtagctgggattacaggcatgtgccaccacgcctagctaatttttgtatgtttagtagagagggagtttctccatgttggtcaggctggtctcccgacctcaggtgatccgcccacctccgcctcccaaagtgctggaattacaggcgtgagccaccggcctaaaaggcattttaatgggatgagatgaaaactcatcgcgattgtaatttacatttctgtgatgatgagtgatgctgagcactttttcatatacgtgatcgccatttctatgttttgtttgtggagaaatgtctcctcatgtcttttgctcgttttttaattaaattgttttattgagttgtttgagcttcttatatttccagttattaatcccatctcagatgaatagtttgcaaatatttgctcctattttgtgggttgtctcttcactttgttggtttatctttggtggtgcagaagttgcttggtttgatgtaatcctaatggtctattttttgctttgattacttgtgttttgaaggttttaaacaaaatgtctttcatcagacaaatgtcttccccattattttcttctacatgtttcataggttcaggccttagactcatgtttttaatccattttcatttgatttttgtgtaaggtgacaggtatagatgcagttttattcctctgcatgtagatatccagttttccccacaccatttattgaagactgtcctttcctgattgtaagttctcggcacct[134 bp omitted]tctactaaaaatacaaaaattagctgagcatggtgatcagtgcctgtaataccactactcaggagtttgaagcaagagaatttcttgaatccaggaagtggaggttgcattgagctgagattgcacctctacactccagcctgcatgacagagcaagattctatcacacacacacaaaagaaagccattggatgtaaatgcatggattatatctgtgttctccattctgttccattttttatgtgcctttctttatgccaatgtcatgctgttttgcttactacagctctgtaacatatttctaagtcaggtagtgtgatgctcctgttttctctttataccttcaagtctcaagacagtgggcatcgcacacaaaaattatggagaaaaggatcccaagactcccagggtccaacattagataacagagtgttggccatgaaccaacctcaaagatttccattgagtagaggacaagcaccctcatttcctcacatctctcctgtcccgtgttctaggaaacccttcaagtagttggccttcacccacagaaccaagctccaaatctggtgagtaaaggacccctcttatctctgcttttggaaacctggggaggtggaagccttggatgcaagtgttggctcaaacctcccagctctgtgaatgagggcctgtcttccaccatctctgaactccagacactccaacagtgaaagggatctagggccaccaaagggctcagcgaagtctctttacctttaatttcctgcaggtgagacctcctacaagctagaagaataattgccaatctgacatccttctcaggaaaaatgcagtgttttttctgcctgcattcctaactggaggataaattcccgggggcttgagagagggaagggaagggaacatctgatgagggtgggtgttttagagaagttccacttgccaaggaatgaattactgttggtcatcaggcaaccctggctgactcagcagagcaagagccttgccgtaacagagaacagagctcatgcacgcacacttcgactcagtgactcattcagccacagccccatgctcaggctgtgcagtgtggaagcttttcctattgttgccataacaaatttccacaagattcgtgtgtgaaaacaaaacggttatttaattatcttacagtgctgtagctcaaagcatgacgtgcatgtcactgggctaaaatcaaggtgacagcaaggctgccttccctctgagggttccaggcaagaatctgcttctcacttttctcagcttctagaggctcccatgttccttggctcctggtacccttcctccttcctcaaagcccacaaagactggtcacatctcacatggcatcactcagacccttcttccttaccacacctctttctctgaatgctgctctcccttcttgcccttcttttgaaaacttggggattctattgggttcaccaagatgaaaatccatcataatctcccggaaatcatccaggataccctccttttaagttcagctgactagcaaccataattccatctgcaatcttcattcctcctttcatgtaaaataacatattcacaagctatggaggctaggacatggacatttttggggtgggacaacattctcctgccttccacaaacagtgaacaagatgcatttggcctctgttcttgggacactgatcttgcagatggttaaatgggagggcagaaaatgtaggcacaaggggaccaataaatgaatgatctattgagaagcatctgtgcatgaaatctatttatttatgtatttacctacttgtttattgagacggagccttgctctgtcgtccaggctagagtgcggtggcatgatctcggctcactgcaacctccacctcctgggctgaactgatctcctccctcagcctctccagtagctgggattacagaccacaaccaccacgcccggctaactctttttgcatattttctgtagagaggatgtttcaccatgttggccaggctggtctcaaattcccaacctcaggtgatccaatagcctctgcctcccaacacgctgggataagaggcatgagccacggggccaagccaaattttcaaatcaataatagataatgctgagtgtattatttcaggtgacagagaagttctcactaatcagatatttgtgacattaatgaaaaacacggattgaacccctgaaagattggcggaaggattttgcacacacagctgtcagccgtgaaggcacaaaggtgaaaacaatctgatgtggaaggaagaggctctgactcaaatgctgggaatgaggtggggagaatgacaagatgactgtagagagacggagagcacactgggtacacaggaaactaaggagcaacaaggagcgtgtgtttgacactcacagccattggattcacctcgaggtaaccaggaatccctacatgattaatatgactgacatgaaaataagggaggctcagttgcataactggaatctaggagaccgtggaaaaggcaattgccgccccactggtgaaatgtggtgctgatttagacactaaatgaatgaagtagatggatataagatatgtttgtgaggtagaatcattggctggaaaggcttgctgggtttaatttttcctggtagtttaatcctcgcttcactaacttatttctgagatttatttctcctgcatctaaatcaatacctggcagaggagggagagctagatgaggggtggtgcaaatgaagggacctagtatagcataatatacaaggctgtgaacggtggctcacgcctgtaacccagcacttcaggaggccaacgcgggtggatcacatgaagtcaggagttcgagaccagcctggccaacatggagaaaccctatctctactaaaaatacaaaaattaaacaggcatgatggtggtgcatgactgtaatcccagctactctggaggaggaagcaggagaatgacttcagccctggaggcagaggttgcagtgagtggagatcgcatcactgcacaccagcctgggctacacagggatactctgtctcaaaaaataaaaataaaaaatacataaatataataatatacacaaatgatgcaggcacctgaattccaatcatcatttttctattcctctataattacttctttgatcctttatcttatccattagaaaatcagcctaaaacctcttccatatttggctttctgtgaacatgagatcatatggaaaatatgaaagccccctgaacccaccagcacaggccctgaaatagggaaagtgctctgttcatcacaagaaactttccccctcacccaaatcccccacctcacccctacttccaatcacctgtggagatacagatagatcatggggaggtaaacgctaatactccttggagtgagttcagatcttggaatcagagatcagcaccagcactagctcctgctcccctttcctactaattcacaggaggacaggtggttttgaagcaatagatggtggagggggtggtctttcccccagcctctcaggtggaacagcagcctaacatgtgtctcgcgagatcacaaagagtagcacgtttcacatgggcttcatcattatttcctggctgtttgacataagagaattctactttgcttttttgatcttgatttcacttttgtgtccttttcttggagaatgtaatttgagtcaagagggttgtggatgtagaaactgtaaagcacattcactgtgtatcaatcccagtccagtctttccagagaagactctaaacacctgctgtactgcacctgggcctatgccaatttctatcactcaccgtcactccagggagacagaacacacagagaatacgttacataggcaggttcattactaacagataagcagcgagtgacaacagaagcctacatttcaacgtgagccagtccctcaaggctcagaaaagctgctcgggacatatggagtcacctcatttgcagtgtatctgggggaagccagaaaatagcccagcctgggttttgtaccctgaagccacaggaagcactcagctaaagcactgcatgacgtcctcctccaggaagaacaggaagacagcacaggctgttctgagacgttcctcctgatctcaggacgttgctgtcttagtccatttttgttgctataaaagaacacttgagcctgggttacttcttttttttttttttttttttttgtatagtgcttctgatgagcttttttttaaaatttttattattattatactttaagttttagggtacatgtgcacaatgtgcaggttagttacatatgtatacatgtgccatgctggtgtgctgcacccatcaactcgtcatttagcattaggtatatctcctaatgctatccctcccccctccccccaccccacaacagtccccagagtgtgatgttccccttcctgtgtccatgtgttctcattgttcaattcccacctataagtgagaacatgcggtgtttggatttttgtccttgtgatagtctactgagaatgatgatttccaatttcatccatgtccctgcaaaggacatgaactcatcattttttatggctgcatagtattccatggtgtatatgtgccacattttcttcatccagtctatcattgttggacatttgggttggttccaagtctttgctattgtgaatagtgccacaataaacatacgtgtccatgtgtctttatagcagcatgatttatagtcctttgggtttatacccagtaatgggatggctgggtcaaatggtatttcaagctctagatccctgaggaatcgccacactgacttccacaatggttgaactagtttacagtcccaccaacagtgtaaaagtgttcctatttctccacatcctctccagcacctgttgtttcccgactttttaatgatcgccattctaactggtgtgagatggtatctcattgtggttttgatttgcatttctctgatggccagtcatggtgagcattttttcatgtgttttttggctgcataaatgtcttcttttgagaagtgtctgttcatgtcctttgcccactttttgataggattgtttgtttttttcttgtaaatttgtttgagttcattgtagattctggatattagccctttgtcagatgagtaggttgcgaaaattttctcccattttgtaggttgtctgttcactctgatggtagtttcttttgctgtgcagaagctctttagtttaattagatcccgtttgtcaattttggcttttgttgccgttgcttttggtgttttagacatgaagtccttgtccatgcctatgtcctgaatggtaatgcctaggttttcttctagggtttttatggttttaggtctaacgtttaagtctttaatccatctcaaattaatttttgtataaggtgtaaggaagggatccagtttcagctttctacctatggctagccagttttcccagcaccatttattaaatagggaatcctttccccattgcttgtttttctcaggtttgtcaaagatcacatagttgtagatatgtggcattatttctgagggctctattctgttccattgatctatatctctgttttggtaccagtaccatgctgttttggttactgtagccttgtagtatagtttgaagtcaggcagcatgatgcctccagctttgttcttttggcttaggattgacttggcaatgcaggctcttttttgattccatatgaactttaaggtagttttttccaattctgtgaagaaagtcattggtagcttgatggggatggcattgaatctataaattaccttgggcagtatggccattttcacgatcttgattcttcctacccatgagcatggaatgttcttccatttgtttgtatcctcttttatttcattgagcagtggtttgtagttctccttgaagaggtccttcatatcccttgtaagttggattcctaggtattttattctctttgaagcaattgtgaatgggagttcactcatgatttggctctctgtttgtctgttattggtgtataagaatgcttgtgatttttgtacattgattctgtatcctgagactttgtagaagctgcttatcagcttaaggagattttgggctgagacaatggggttttctatatatacaatcatgtcatctgcaaacagggacaatttgacttcctcttttcctaattgaataccctttatttccttctcctgcctaattgccctggccagaacttccaacactatgttgaataggagtggtgaaagagggcatccctgtcttgtgccagttttcaaagggaatgcttccagtttttgcccattcagtatgatactggctgtgggtttgttatagatggctcttattattttgagatacgtcccatcaatgcctaatttattgagagtttttagcatgaagcgttgttgaattttgtcaaaggccttttctgcatctattgagatagtcgtccggtttttgtctttggttctgtttatatgatggattacatttattgatttgcatatattgaaccagccttgcatcccagagcctgggcaacttctagagaaaacagatttgtttgcctcacagttctgcaggctgtactggaagcatggcaccagcatctgtttcctgtgacggcctcaggctgctcccactctggcagaagggaaggagggtctgtctgtgcagagaccacagagatcacatggcaagagagggagcaagggggagggcgagcgatggagcttccaagctctttttaacaaccagccctccgggaactaatagagggggaacttgctaaccccatcatgtggggcagcattaatctattcatgatggatccacctccatgactcaaacaccttcccataggcccaaacttccacactgggggttaaatttcaatatttcagtgtgaggtttcaaagggtcaaacatctaaactaaagcagctgtatcctcagcatgttctatggtttctatgagagctgtaactgagaaagcaggagaaagctgggtctcccgccatcaggctgcttgtcctaaggagatgttccatgtggttacctgtcaatcaagaaatgagacaatccataaagaggaactgctatgattagcttcttattggattcccatcttcctccaggtatctgcagacacctgcatgttctgattgggacctcagtggtcatcttcctcttcatcctcctcctcttctttctcctttatcgctggtgctccaacaaaaagagtaagtctcacgaagcagaggccagagagctcagggccatgtggggaagcaggatgggagcacgcgggtgtgtgttcctcactggcaggatggtccctggcccaagggaggagccacagaggcagggctttctagagagagcaccagacaacctgcccctgccttcagctcacagaccattgcctggttctgaactgtatcctcacatcccctgcagctactgacatccagaagcttccatgacaggcagaaagtgggagacagaatcaatgggatgccaattgagagcacttcatgggatggggtcttgaactcagagagatagaatgtctgagtctggatgttggcagctgaagagcctcaggcacctacagcctccccctgtgggttggtgtctgcccatgaaatgaggacccagaagggccctccaagcggttttgatgacttccgtctcctacagatgctgctgtaatggaccaagagcctgcgggggacagaacagtgaataggcaggtaggtcctcctcggcccagcctcacggatacagtcttatccctaatagtcctgaaaaatgtgagcaccctccctcactcagcatttccctctctccaggactctgatgaacaagaccctcaggaggtgacgtacgcacagttggatcactgcgttttcatacagagaaaaatcagtcgcccttctcagaggcccaagacacccctaacagataccagcgtgtacacggaacttccaaatgctgagcccagatccaaagttgtctcctgcccacgagcaccacagtcaggtcttgagggggttttctagggagacaacagccctgtctcaaaaccaggttgccagatccaatgaaccagcagctggaatctgaaggcatcagtctgcatcttaggggatcgctcttcctcacaccacgaatctgaacatgcctctctcttgcttacaaatgcctaaggtcgccactgcctgctgcagagaaaacacactcctttgcttagcccacaagtatctatttcacttgacccctgcccacctctccaacctaactggcttacttcctagtcctacttgaggctgcaatcacactgaggaactcacaattccaaacatacaagaggctccctcttaacacggcacttacacacttgctgttccaccttccctcatgctgttccacctcccctcagactatctttcagccttctgtcatcagtaaaatttataaattttttttataacttcagtgtagctctctcctcttcaaataaacatgtctgccctcatggtttcgataatgtgactctttattcgccaaaagtttccagtgttatcattactatgtccatataacctgatatgttctctactgggttctcagccctggactctgagcttctggaagcagggtggagcctcatttgtctctgggactccaatttccatccaaagatgcagcacataggaggttccaaggatcgtgaatcacatgaacaagtgatattcttactctctgcagacctggaaagctggcagagtcattccaagatgaaacatttgtagagtcataggccttgttagtctcatctccacagggacacatgtcaacacatcatctttcatactataaatatacagtcgctcctccatatctgtggggtttacaggtgtttattgaaccaaatataaatcaaaaatattcagagaaaaaatccacaaagttccaaaaagcaaaaatactatattgtgtggacacaagtgaggtggtgtgtaggctgtatcaggaattataagtaatctagagatgatttcatgtatacaggaggatgtgcatgggttatatgcaaacgctgtgccatttcatgcaacaggcttgagcatctgcagattttggtgtctggtagggaggggggtttcctggaaccaatcacccatgaatagtgaaggacaactgtatataattttcattcatcaattttataaataaatcatcaaaatgtatgataataagataaaaaattagcagtgtttttatggtgtgaaaataagcttagatttattttttcctgcttgtaaccctctggtccaatgttatttactgagaagacattctattccaccttaatccgcatggcagcctctgtcaactataaaaggactgtgtgtacacagatgtattttacacactcttttctgctcagtggctctctgtgtccactctcatgaggatgctgcactttatgtggccttatagaaccccttaaaatttggcagcctgaatcctctaatttctccttcctctttaagattgccattattattattattggctatttgcttttccatgtaaatttgtaatcatttttctcatttccaccaaaaacaatgcttgtaattttgttgtgactcccttacatctacaggtaagttctgtcctatagaaacataatgcaaaccacatgcattctttcaaacttgctagtatccaaattaaaaagctaacaagaaacagataaaattaatttaagttaacccaatggacccaaaatattattaacccaacagacccaaaatattaacctaatagatccaaaatattattttattatacaagtagactcaaaatattatcatttcaacatgtaatcatgtgtcatcttggaaaacatcagatccctgtctaggtgggcaaagatttttcttcgtaatatctcatttccacatttccacttggcacagaaactgcccccaaggctcaggatactaagatgcagtaggaatgggtagatgtatctggaggaaagtgactgaatgaaattgagacatcagagtctgggaaactcactagaactacagggacagtgtgggggagggaattgggagatgttgatcaaaggatacaaactatcaggtattcaggaggaatgggtctgaagatctcttgtacagctttgccactatggttgacaatactgtactctatacttgaaatttaccaggaaagtagatttttttttttaaatatggaacacttcacgaatttgcgtgtcattcttgcgcaggggccatgctagttttctctgtatcgttccaattttagtatatgtgctgccgaggcaagcatgggagagtagattttttttttttttttttttttttttgagctggagtcttgctctgtcacccaggctggagtgcagtggcgcgatctcggctcaccgcaagctccgcctcctgggttcacgccattctcctgcctc[175 bp omitted]cccggctgggagagtagatcttaagggtcctc[140 bp omitted]atggtgaaaccctgtctctactaaaaatgcaaacattagccaggcgtggtgacacaagcctgtaatcccagctactcaggaggctgaggcacgagaattgctggaacctgggagcggaggttgcagtgagccaagatggcaccactgcactctagcctgggggacagagtaagacttcctctcaaaaaaaaaaaaaaaaaaaaaacaataaccctgcgagatgatggatataactagcttgactatgatgatcatgtcaccatgtatacatacatcaaaacatcaagtgtaatacaccttaaatatatacaatttccatttgtcaatcatatctcaataaagctaaaagaaacctctaagtttcaactttattttcagaaagctgtgccatgcttacctcagtgcctaagtatactctaattcatggaaatggcctttaaaactgcagagagtggctgggtgcagtggctcacgcctataatcccagcactttgggaggcggaggtgggcagatcacgaggtcaggagttcgagatcagcctggccaacatggtgaaactctgtctctactaaaaatacaaaaaatagctgggcatggtggcaggtgcctgtaaatctgagatactcaggaggctgagacaggagaatcgtttgaactggggaggcagaggttgcagtgagccgagatcctgccattgcactccagcctgggcgacagggtgagactccatctcaaaaaaaaaaaaaatactgcagagagttaaggccctcactggacactctccggtacctctgaggtcagtggatagagaagcagctccccttcttcttcctcgaaacaaaggcctccttccttcttaggtgtttgagacaaattctccacacaggtgcagctgagtgctgtaaagtcccactgagagttgaaggtccccactgccagtcacagttcggtcccactgagggttgaaggtccccactgccagtcacagtttggtcccattgagggttgagagtctccactgccagtcacagtttggtcccattgagggttgagagtctccactgccagtcagtttgggcttattagggtttatgctgtgcacggagaatggaacctaccaatcaactcttagtgaccagttagacagattcaaggcaaatttccctgctgggaaatcccaaatcccaaaatatgcagagaccaatagatgcctcaattcttccgtgtctccgtctaaatccttgggtcactgtgactcctgtagttatgtggcttgtaattccttgggccgtagaatggctatgataggccctgtgctaaggggactggtgacagttgagacaggaacatggaagctatagtagtcagggttctccagaaaaaaaaataatcaacactaataatgatagatatatagataatgattgatagacaaataatgatagatatataatgatatcacaaataatgatagacatatagttggataatgacagatatataatgattgatacacagatagggtatttatatattggcttatgcaactatgtagactgacaggtcccatgatctgccatctgcaagctggagacccaggggagtccacgtgtagttccagtctacgtgcaaaagtctgagaaccagtagagttagtggtatacgtaacagtccaaaagctagcaggctcatgccgggcatgatggctcacgcctgtaatcccaacactttgggagaccaaggcaggcagatcacctgaggtcagagttcaagaccagcccggccaacatggtgaaaccccatctttactaaaaatacaaaaattagccgggcatagtggcattcgcttgtaatcccagctactcagaggctgaggtacgagaattgcttgaacccaagaggtgaaggttgcagtgagccgagatcatgccacagcactccagcctgggtgacagagtgagactctatctcaaaaaaacaaacaaacaaaaaaagctggcaggcttaacatctaaagagtcaatgttttagtgagagttcaagagccagaaaagactgatgtccaggcaaaaggaacttcatcttacattaccagttcaatgttttgttctattcaggtcccacctgattgaatgaggccgactcacattagggagagcaatctgctttataaattacactaattccattgataatctcattcagcaacacccccacagacacacacagaataatgtttaaccaaatatctcagcaccccatggctacgttaccattcctgttccacaaaaggaggaaacaaaagaacaaaaccacaccaaatgttgtggtaagttgacaaaatctgttccagcccattagtaaatattggccactgaagttcctgaaattcaacaattagtaagtatctctctcccaatagaaagccacgtcatttgtaaaccataacaatagcttttgtttttttgagacacagtctcgctctgtgttgcccaggctggagtgcagtgatcttggctcactgcaacctctgcctcctgggttcaagtggctctcctgcctcagccttccgagtagctggaattacaggcacccgccaccacacccaagtaattttttatatttttagtagagactgggtttcaccacattgaccaggctggtcttaaattcctgaactcaagtgattcacctgccttggcctcccaaagtgctgggattacaggcatgagctactgcacccagccaacaatagtatttttaattaggtcatcctgcctttacaatctctgcattttaaatactcaactaagagtacagccattatttgtctttcacccaaagtcccattcaagtgagaacaaaggaatgaataaataaggcataagtaacaaaacaacaaaaaaagaaaattagaatgcggtcaatttcatgcaatcatcaacaccaaatttccagaacgtagtatttccaaatttcccgaacgtaaatatgtatgtggaaattaacaaaatgtggcaaaacaaaaggtcacttaaatttgcacaaatgaaacagtcaacatggaagctgatcggctttctgaaatatgggacaagctcaggacttcaaaatacttcg[187 bp omitted]tggtggcggatgcctgtagtcccagctactcgggaggctgaggc[131 bp omitted]gtagaaggtttaattaggaatatttcactctccatacctgaagaattcgtgatagccaggagtctacaatcaaaataacataaataataagataaaaataaaattaatttgaagccataaaaaaagaatgagttcatatgttttgtggaaacatggatggagctggaggccattatccttagcaaactatacaagaacagaacaccaaatacagcaggttctcacttataagtggaagctaaataatagaactcatgaacacaaaaaagggaaaaacagacaatggggtctcctttagggtggagggtgggaggcgggaaaggagcaggcaaagtaactattaggtaccaagcttattacctaggtgatgaaataatctgtacaacaaacccccatgacacaagtttacctgtataacaaaccttcccatgtacccttgaacctaaaataaaagttaaaaaaatactcaatgagcaacaatgtacattatttgaggataattatattaaaagcccagacttcaccactacacaaaatatccacgtaataaaatttcacttgcgctccttaaatttatacaaataaacaaaaaagtataataaaatagtagattctttctttagagatgacaaatagtgccagagaaaatgcctccacactctggcattgagatcatctccaggataagggtatactgcatgcctggtcaagtccaagtaaatatactcagaccatgaatctcagagatgaaacataggttcagaacagacaaagccacagagcttttgactaatggcccagtgaaggcaatgtctgcctgtatggtatccaccaccttatattctgtcccaagcccgtctatttggatgtagcatctggttcaaagatgaatttgaacaccattagacactggcttaatgaaaattcacttctcattcgtttctcatctgaaacataaatagaaatataggtcttaggcaggaggatttcttgatgccagaagttagagactaccctggccaacatagaaagaccccatctctatttaaaaaaatatacatatatatgtcttctcttgggctccacccaagagcaacctggaactaagttattcggcaacgaactgttccactttgttgtgaggcaatagatgtggaaattccctgacgaggggctctgtcctcatacttcctgcggagcttattgtcgtaagaatatctgtcatcctgctaatgtgcattgaaaggagagcaacggggctgaggccgtgtcagcacgatggaccccaaacagaccaccctcctgtgtcttggtgagtttcagagtaaaagtgggttagaggggaagatagagaaatcccaaaataatcagggtgtctcttaacagtgtgactaggagattttagtggctgccaaggagattctgatctccttagtggaaaggccgtctttgtcaatgtatctataactttgtctctacccaagcccaagctagcttgtggggctcaaggtttaatatttgtattaaacctatagtgtgttatctgggattcatgatggtcccaaggttcttatcaaggagagacttagaggctggaatctgaaaggtaaaaataaagaatgaacctcaaaactgtgattgttgtggaaggaaaacatatgatagaaccccatatagaaatatggttactagtattttgttgaagatttttgcatttatgttcaacaaagatattatccagaagttttctgtttttgttgtatctctgccacattttgttatcaggataatgttggcctcatagaatgagttggggaggagtccctcctccaggatttttttcaatagtttcagtaggaataatactagctcttcttggccgggcgcagtggctcacacctgcaatcccagcactttgggaggccaaggcaggcggatcacaaggtcaggagatcaaaaccatcctggccaacatggtgaaaccctgtctctactaaaaatacaaaaaaattagccaggcgtggtggcgggcgcctgtagtcccagctactcgtgcggctgaggcaggagaatggcatgaacctgggaggcag[131 bp omitted]gtactggtctttttctggtctgtcattacagagggtgatttgtcgtaaaggttggaaatggaagcttgatttttcataaatctctctcttccagtgctctgtctgggccagaggattcaggcacaggaaggtaagtgtcctgtaaatctctcccagcccctttagaccctcttgggagctctaggataaagaaattgaagaatagcctgaagcaccattcttattttaatccccattctagttgtttctgctgtgcttctcttgcataatttctatctcactttgttatctccaaacccttcagactcattaatgctcaggcctggatttatagttagtccttgcctgtgttagactgtccatgaaggatctgtaatttactgaatgctcaaactgcaagaatgaggaagtcaggagtcatctgcccaatatccttccttatgctgattctattttgttttagcaacccacttcctcccgtcacttcatttaaaaggatgctgccatagtctaaccctactgaacactctagcattctgtagtactactgcagtactaagcatgaggcagtcttagtgtactactgaatattctgccaccccaactactactgccttagcctcctaatgggtgtgagccccacgtccatccatgtcttctctcttccagctccttctaaagcctgaattatttgtgtgttgaacaatactcattcttcctatccatgagcatggaatgtttttccatttgtttgtgtcatctatgatttctttgaccagtgttttgtagttctccttgcagagatctttcacctccctggttagctgtattcccaggtattttattctttttgcagtaattgtgaatggattctattcttgatttggctctcagcttagatgtttttggtgtataggaatgctactgatttttatatattgattttgtatcctggaactttgctaaagttgtttatcagattaagaagtgtttgggcagagactgtggttttctaggtatagaatcatatcacctgcaaacagggatagtttgacttcctttcttcctatttggatgccttttatttctctcttgcctgattgctctagctaggacctccagtactatgttgaacagaagtagtgagagacggcatccatgtcttttgccagttttcaaggggaatacttccagcttttgcccattcaatatgatgttgactgtgagtttgtcatacatcattcttattattttgaaatatgtttcttcaatgcctagtttgtcgaggttttttagcataaagggatgttgaattttatcaaaagctctattgagaggattatgtgtgtggggagggttgttctatttatgtgatgaatcatatttaagatttgtgtatattggccgggcactgtggctcatgcctgtaatcccagcactttgggaagccaaggcttgtggatcatgaggtcaggagatcgacaccatcctggctaacacggtgaaacctcgtctatactaaaaaacacaaaaaaattagccaggcgtggtggtgggcacctgtagtcccagctgctcgggaggctcaggcaggagaatggcgtgaatccaggaggcggagcttgcagtgagccaagttcacgccactacactccagcctgggcaacagagcgagactcctatatcgaatcaaccttgcatcccagaaataaagcctacctgatggtggtggattagctttctgatgtgctgctggatagtttgctagtattttgttgaggatttttgcatttatgttcaacaaggatattgtcctgaagttttctggttttgttgtgtctctgccatgtttttgcatcaagatgatgctggtctcatagaatgagctggggaggcattcctcctcctgaatatttttggaacgtttcagtaggtatagtaccagctcttctttatatatcagatgggattcagctgtgagtctgtctggtactgggctttttctggtctgtaggatttttattactgattcaattttggagctcattattggtctgttcatgtattcaatttattcttggtttgatctcaggagggtgtatgtgtccaggaatttctccatttattctggattttctagtttgtgtgcatagaggtgttcataatattctctgatgattgtatttctgtggggtgagtggtaatataccctttgttgtttctaattgtgtttatccggatcatctctcttttcttctttattagtctaactagtcatctgtcttactaattttttcaaaaattctactcctcgatttgctgatcttctgaatgctttttcgtgtctcaatctccttcagctcagctctgattttggttatttcttgtttcctatgagctttggggttgatttcctcttggttctcttagttcctcttgttatgatgttaggttgttaatttgaactttttctagctttttgaagtgggagtttagtgctataaacttcccccttaacactgccttagctgtgtcccagagattctgctatatttacccaaaaattccagaacagactgcttaatttccatgcattgtacagttttgagtggttttcttagtatttattcctatttttattccactgtgctctgatttcgc[132 bp omitted]cctcagcctcctgagtagctgagactacaggtgcccgccaccc[131 bp omitted]caccgtgcccagcctgctaaggattgctgtatgtctgattgtatgattgactttagagtatgtgccatgaggcaatgaaaacaatgtagattctgttgttttgggggtggagagttctgtagatgtctgtcaggtccatttgatccactgctgagttcaggtcctgaatatctctgtttgcctcaatgatctaatactgtcggcgggatgttaaagtctccccctattattgtgtggttgtctaagtctcttcgttggtctctcagaacacgctttatgaatccgggtgcttccatgttaggtgcatatatatttaggatagttaggtcttcatgctctttttttaattttttttttctttttctttttgattcagcagttgggctattacacactccttagcagattccgacttccgtggccactgtcctgctatggtcttcatgttgaattgaaccctttaccatgatttaatgcccttctttgccttttttgatctttgttggtataaagtctgttttgtctgaaattttaatagcagctcctgcatttttttttttttttggctttccatttgcttggtagatttttctccatttctttactttgagcctatggatgtcattgcatatgagatgggtttcttataggcagcataatgttgagtcttgcttttttttttttttttttttttgagatggagtctcactctgtcacccaggctggagtgcagtggtatgatcttgactcactgcaacttctgcctcccaggttcaaatgattctcctgcctcagcctcccaaatagctgggattacaggtgtgtaccaccacgcccagctattttttttttttattagagatgggatttcatcacattggccaggctaatgtcgaactcctgacctcaaatgatccacccacctcagcctcccaaagtgccagggttacaggcgtgagccactgcacctggcctcttgcttctttatccaacttgccactctctgcattttaattaggacaattagtccatttacattcaaagttagcatttacatgtgcagattttttcctgtcatcatgttgttagctggtttggttattatgcagacttgtttgtgtggttgttttatagtgtcactggtttatgtacgtaagtgtgttttctattggctggtgatggtcttttctttccatatttagcgttcctcttaggacctcttgtaaggcaggcctgatggtaataaattccctcagcatttgcttgtctgtaaaggatcttatttctccttcacttatgaaacttagtttggctgggaatgagattcttggttggaaattcttttcataagaacattaaatataggcccccaatctcttctggattgtagagtttctgctgaaaggtctgctgttagctcgatggcattccctttgtaggtgacctgccccttcttttttgctgccttttcacatttttttttttttttttgagactgagtcttgctctgttgcccaggctgccaggctggagtgcaatggcgtgatctcggctcactgcaagctccgcctcccggattcacgccattctcctgcctcagcctccccagtagctgggactacaggtgcccaccaccacgcccagctaattttttatatttttttagtagagatggggtttcaccatg[137 bp omitted]tttgtgtcttggggatgctcttcttgtgtagtattttgcaggggttctctgtttcctgcatttgattcttggcctctctagtgacgttggggaagttttcatgaacaatacactgaaatatgttttccatgttccttgctttctccccatctctttcggggatgccaatgggctatttggtctcttttcatgatcccatatttcttagaggttttgttcattaatttttattctttttcttcatttttgtctgactgaattagttcagagagccagtattcatgctctgagattctttccttattttgctttattttgccattaatacttgtgatcgcattatgaaatctcgtagtgtgtttttcagctccatcagatccgtttggttctttcaaaatgaccatctcatagattagcccctctgtcattttattgtaatctttaggttccttgcattgggtttcaactttctcctgaatcttgatgaccttaatttctatccatattctgaattctatttctgtcatttcagccaggtaaagagcccttgctgggaagcttgtgtggtaatttggaggaaggaagacactgttgctttttgagttgatggagttcttgctcagttctttctcatccatgtgggctaatgttcctttgagtgtgctgcaatttgaatttttttcttttttcttttaaccgtgatgtaatttgagcacagtcagtagacttcttttctggatggtttcagagggctggggcttcgcacagggtctttatttatagctaaattcttgtccttggtttcacagggaggtatattagcgagcatttttggtgttgaagtttgggctgcaatccggtaaatgatgcttcagcacaacggccagtaggtcattcctcatgattgccgctgtgctccctctcacgctctgaaagtgcgggctcctctcccacccaagtgctggctgcagatctgggctcggcactcccaggctgcacatcacagctctggggtgagctcagactttatgttccctccgtggcttgggggcagcaggggaagggaccttagcagcggttgtggcagacggcctttcacttgtcccttggaactccaccccagagagatgtggagccactatcagtgcgatgagccaagagtgaggcgactgcactgtgggtccaagctaggggccctgcctagtgatgagcaggggggacaggtgggtcacaggggtgacagactggcctcttctccttagggcagtttgccggaggtgtggttgaagcactcagagtctttgctccttccccagtctgagggcagcaaggccagtaccaccgcagtggcagcggcagagtgaccttccgttgcctctgggagctccgccacagagaaacgcagactcacagctgctgggaacgctccgccagagggtggggctgttgtgccgcggaatcaagctggggcttgttgaagagcagggggttgagggctcacagggagaggagactgagctcctctccgtatggcgactgcggtgtgctggaagcatgaatgaaggccgggcgcggtggactcacgcccggaatcccagcactttgggaggccgaggcgggcggatcacgaggtcgggagatcgagaccatcctggctaatctggtgaaaccccgtctctactgaaaacacaaaaaatgagccgggcgtggtggcgggcgcctgtagtcccagctactcgggaggaggatgaggctgaggcaggagaatggtgtgaacccgggaggcgcagcttgcagtgagccgagatcgggccactgcactgcagcgtgggcgacagagcgagactccgtctcaaataaataaataaataaataaataaataaataaataaataaataaataaattgaagcatgaatgaaggccccaggctccttgcttcttccccagatcacgggcagcagaggcagaacccttgccatggcagtggcagaggggctgtcagttgcctctgggagccactccccagggaaacacgagccaccaccagtgagtgtgctgagggcggggcagctgctctgcactcccgagctgggggctctgcctggtaaagtgggggtgggagctcacggggaagagagactggactcctctctgtctgatggctgtggcataatgaccgggcccccacacatgaaaaagaattctgggaactcaaaaagccagtgtgtccccaccatggaccccttggattgtgtttcaaatttctcctcaatttcgaagagcgtcctggccatccagattctgaattctataaccctcgtttcattcatctcaatgtagctaagaaccagatttctggggaactatcgagttgccagagttcttgtgttgattcttttttttttttcttttttttttcttttttgtggcagagtcttactctgtcgcccaggctggagtgcagtggcacgatctcagctcactgctgcaaccttcacctcccgggttcaagcgattctcctgtctcagcctcctgagtagctgggattacaggtgtgtgccaccacgcccggctaatttttgtatgtttagtagagcccgggttttgtcacgttggtcaggctggtctcaaactcttgacctccggtgatctgcccacttcagcctcccaaagtgctgggattacaggtgtgagccaccgcgcccggccttggtgttgattctttctcttgtgtgagggctggtgttcctttaactgtgatgtcggttgagtacagtcgcttggcttcatttctgggtgttttcagatgccaggactctgcacaggatctttatttgtggctgaatttttcccttcattgtatactggcaaaatttttcagtgttgtattttgaagtgtgatccagtaggtggcacttaaaagggttggccagcatacaggatcttagccacaaggctcttttgtagttttgtttcgttttttgtttcgttttttgacacagggtcttgttctgtcgcccaggctggagcacagtggcacaatctcggctcactgcagcctctacctatcaggctaagtgatcctcctgcctcagcctcctgagtagctgggactacaagcacgcagcaccataaagagaaaatttttgtaattttttttttttttttgtagagatggggtttcaccatgtttaccaggctggtctcaaactcctgggctcaagcaatctgcctgccttggccccctaactcttgtattttgacaaagtcggcagtagtgctctgtggttgtgaggaggggtgactccctcgcctggtccattcttgggccttggaggagcctcctacagtcactggctctgcacccactgtttcctttgttaggattgttctgcccacggggctccctcaggcagggcatggtgggcagacaggctgtatccttccccggccagccctatggagggaggaccaccccgcacctctgcaggctgatgaaatcaggtgtttcacccctctgaacgttctgagaatgagggctcctcacggcttggtcgccacctaacgtggtgagtccttctcagcaagggtgattggagccacatgatctgccatctcagtgcttcccaggggaacacagagctactgggcatggtggctcacacgtgtaatcccagtactttaggaggc[137 bp omitted]tgaggcagaagaatggtgtgaacccgggaggcggagcttgcagtgagccaagatcacaccactgcactccagcctgggcaacagagtgagacttcatctcaacaaaaaaagaaaagaaaagaaaaacacagagctgcacaccccacagagttcaggcagaagggggtctgcagcgctggaagacccagcaagcctggcccgtctggctgcaagtggcaggggtgggtggagtcacccacttcaccatctgggtgctttccagggaagcatgcagccacgaccccgggcagagttcaggcagaagctgggccactatgctggaaactggccttgagccttgtggagtaacggcaggtggagccatctcactgctcccacgcaccatgcccgtggcctctgcgggggctgtggtaacggcacccgactgctctggggtcaatgcctgcggaggtccccctggcttcagtgttgcctctgcaaaaaccccagttgcagccaggtgcggtggctcacgcttgtaatcccagcactttgggaggccgaggcaggtggatcacttgaagtcaggagttcaagaccagcctggccaacatggtgaaaccccgtttctactaaaaatacaaaaattatccaggcatggtggtgggcacctgtaatcccagctactcggaaggctgaggcagcagaattgcttgaacccgggaggcggaggagctgagattgcaccactgcactgcagcctgggcgacaaaacaagactctgtctcgaaaaataataacaataaaaaataaagatggcaaccatagacactggagactactagatgggggggaagaaagggggttgaaaaactgcctattgggtactatgctcagtacctgggtgacaggatcaatcgtactccaaacctcagcatcacaaattatttaaatttttctctttttttaatttttttgttgttgttgttgagacgaagtctcactctgttgcccaggctggagtgcagtggtgtgatctcggctcactgcaagctctgcctcccaggttcacgccattctcctgccccaatctcccgagtagctgggactacacgcgcccgccaccacgtcctgctaattttttgtattttcagta[136 bp omitted]atggtaggttcttcacaccctaatgtatttttacttctcccacagagaaggaaaggaatggcttccccatggcaagccacctcagtctgggctttcttttcttccaggggactttcccatgcctttcatatctgccaaatcgagtcctgtgattcccttggatggatctgtgaaaatccagtgccaggccattcgtgaagcttacctgacccagctgatgatcataaaaaactccacgtaccgagagataggcagaagactgaagttttggaatgagactgatcctgagttcgtcattgaccacatggacgcaaacaaggcagggcgctatcagtgccaatataggatagggcactacaggttccggtacagtgacaccctggagctggtagtgacaggtaaggaaacatccagggtccacagccctggtgtgatttttttcttatttttaatagagtatttttcaagaagttttagatttacaaacaaaaaaaaattgatgattgcttcagagagttctcagccatctggcaccccacttcccccagagttaacatcttacattagtatggcacatttcttaccattaatgaacaaatatcgacacattcccagctacagtctacagtttatttacattttcttagtttttacctgatagtctttctctgttccaggatcccattcaagatttcacattgcggctgggagtggtggctcacgcctgtaatcccaacacttagggaagccgaggcgggtggatcacccaaggtcaggagttcgagaccagcctggccaacatggtgaattccccgtctctactgaaaatgcaacaatcgctgggcgcggtggctcacgcctgtaatcccaacactttgggtggctgaggtgggtggatcacctgaggtcaggagttcgagaccagcctggccaacacagtgaaacctcgtctctactaaaaatggaaaaaattggccaggcctggtggcacacgcctgtaatcccagctacttgggaggctgaggcaggagaatcgcttgaacccaggaggcagaggttgcagtgagccaagatcacaccactgcactccaggctgggcgacagggcgagactccatctcacacacacacacacaaaaagatttcacattgcattcaggtgtcatgtatctttatttttttttttttttttttttttgagatggagtcccgctgtgttgcccaggctggagtgcagtggcacaatctcggctcactgcaagctccaacctcccgggttcacgccattctcctgcctcagcctcccgagtagctgggactacaggcgcccgccaccacgcctggctaattttttgtatttttagtagagatagggtttcactgtgttagccaggatggtctcaatcttctgacctcgtgatccgcccgcctggcctcccaaagtgctgggattactggcgtgagccaccacgcccggcccccgaaaatgctgggattacaggcatgagccaccgcacctggcctcccaaagtgctgggattccaggcgtgagccaccgtgcccggcaggtgtcatgtatctttaggtttgtcttggctgtcacagcttctcagatgttgctggttttccatgaccttgtcagttttgagggtagtggtccattattttcaagggtactcccactactggaaattgtccgatgttttgctcatgactagactgagttatgggtcattgcaggcaagaccacagaagcaaagtgccatttcatctcctcatagcaaaggtttaaactgtccatgggaacatgactgtggatgttgagctggctgttgttgaaagcctggctgaagtagtaactgtggccagacaccgtggctcgtgcctgtaatcccagcactttgggaggctgggcgccgtggctcacgcctgtaatcccagcactttgagaagccgagatgggcagatcacttaagcccaggagaccagcctgggcaacatagtaagaccccatctgtacaaaaaatcaaaaaattagctgggcatggtggcacccacctgtagtctcagttacttgagaggctgagatggtaggatcacctgagcctgggaggtcgaggctgcagtgagccgtgattatgccactgccctcagcctgggcgacagagtgagaccctc[131 bp omitted]catggagaaacctcatctttactaaaaatacaaaaattagctgggcgtggtggcgggtgcctgtaatcccagctactcgggaggctgaggcaggagactcacttgaacctcggaggtggaggttgcagtgagctgagatcgtgccactgcactgcagcctcagtgacagagtgagactccatctcaaaaaacaataataggctgggcacagttgctcatgcctgtaatcccagcactttgggaggccaaggtgggcaaatcacctgaggtcaggagttcgagaccagcctgaccaacatggagagaccccgtctctactaaaaatacaaaaattagctgggcgtggtggtacgcacctgtaatcccagtttctcgggaggctgaggcaggagaattgcttgaacccgggagacggaggttgcagtgagctgagatcacgccactgcactccagcttgggcaataagagcgaaactccatctcaaaaaaatatataataataacaataataagaagaagaaaagaataaaggagaaaaggtctttctaatagctcactcttttctctcttaggcttgtatggcaaacccttcctctctgcagatcggggtctggtgttgatgccaggagagaatatttccctcacgtgcagctcagcacacatcccatttgatagattttcactggccaaggagggagaactttctctgccacagcaccaaagtggggaacacccggccaacttctctttgggtcctgtggacctcaatgtctcagggatctacaggtgctacggttggtacaacaggagcccctacctgtggtccttccccagtaatgccttggagcttgtggtcacaggtaggtaccgcccagtccagccctgtgtctgggttggctgtccagggccttgccaccgggcaggaatatgaagacgtgcactgagagtgaagtgaagagaggcaaaggctctcactccaggacagtggagagagaaaggcttccccaccacactttccgctttcacttcctcgctagagttctccagacagggttcattgaaaacttagtctgtggagaacagaagggctaactcagtttgtttcattttatttatttcattttattttccgggatagagtcttgctctttcgccaaggctggagtgcagtggcacgatctcgactcactgcaaccttcgcctcccaggttcaagcaattctcctgcctcagcctcctgagtagctgggaccacacagacagggtttc[145 bp omitted]ttgtagagatgtgattaggtatttagtgaattcaccaagtgaggagagaatgaaaagaaaacacaacctgcctggccgggcgtggtggcgtgagcctgtcgtcccagctactcaggaggctgaggcaggagaatcacttgaacccaggaggcagctgttgcagtgagccaagatcacgccattgcactccagcctgggtgacagaacgagactccacctcaagaaaaaaaaaaaaaacatggttgggcacgatggctcacgcctgtaatctgagcacattgggaggctgaggcaggtggatcacctgaggtcgggagttcgagaccagcctggccaacatagtgaaaccccatctccactaaaaatacaaaaattaaccaggcgtggtggtggtgggcgcctgtaatcccagctacttgggaggctgaggcaggagaatcacttgaccagggaggcggaggttgcagtgagccgagatcacgccactgcactccagcctgggcaacagagtgagactccatctcaaaaaaaaaaaaaaaaaaaaacacacacaacctgcccataatcacctccttcccagtttatagcacttccctgggaagcacagttccttgcccgtgaacacagtcttgctgactgatcagtgtggtgctggcgaagcatgagctcattgaggggatgcttgagggagtcccattttggcaagcgaaaaggaaaatgagctcccgtttcagggctctggggttgggatggaatggaacacaaccaccaaccattcatctccttgaattgtgtctccagactccatccaccaagattacacgacgcagaacttgatccgcatggccgtggcaggactggtcctcgtggctctcttggccatactggttgaaaattggcacagccatacggcactgaacaaggaagcctcggcagatgtggctgaaccgagctggagccaacagatgtgtcagccaggattgacctttgcacgaacaccaagtgtctgcaagtaaacacctggaggtgaaggcagagaggagccaggactgtggagtccgacaaagctacttgaaggacacaagagagaaaagctcactaagaagcttgaatctacttttttttttttttgagacagagtctggctctgtcacccaggctggagtgcagtggagcaatctcggctcattgaacctcttgggttcaagtgattcttgtgcctcagcctcccaagtagctggaattacaggcacataccactgcacccagctaatttttgtatttttagtagagatggggtttcactgtgttggccaggctggtctcgaactcctgacctcaggtgatccacccaccttggcctcccaaagtgctgagattataggcatgagccaccacgcctggccagatgcatgttcaaaccaatcaaatggtgttttcttatgcaggactgatcgatttgcacccacctttctgcacataagttatggttttccatcttatctgtcttctgattttttatatcctgtttaatttcttccttcattgttcttctctttttttatttattttatttatttttatttttatttttatttgagacagagtctcactctgttgcccaggctggagtgcagtggcacgatctcggctcactgcaacctctgcctcctgggttcaagtgattctcctgcctcggcctcccaagtagctgggattgcaggctcccaccatcacgcccagctacttttacagtatttttagtagagacggg[134 bp omitted]cccaaatataaatggttggtaagcatgccaaatatattcaataacccccctcctttatttttttttgttgaagtgaggctctccctatgttgcctaagctggtcttgaactcctggtctcaagcaatcctcctacctcagcctcctgctgtgttcatctacaaattgataagagtgaaagtcataatcctacaggaggattaccctatttatttcacaaaccctatttctaccggattttcatacaaggaatacaggcatgtgtttcacctcattaatttattttttcacttagttttgatgatattcacatatattatcaagtgtgcaaacattaaattcttgtgtacaaaactcaaatggtcttccaaataattccccattcttttttcttataaactttcacagctttacccttgacagactttactcaaggaaatctaagttggtcatatgtggctctttcactgattgctatttacttcattgtccagtagcttatgtatgaaaatataattataaaatgtaagggtcctacttccagtgaaactgaagggacttaggcccacttttatcctttactgagagcttatctctacttgataaaatttctactgtattcttggcttaactcaggtcctgtgattaaaaaaaaaatgcaaagtatttctaactttctttattgactgcttttcacactttatacaagttctggcccatatcttcagtttgttctgatttttttcaccaggtgtggtggcaggtgcctgtagtcccagctactccaggggctgaggcaggagaatggcgtgaacctgggaggcggggcttgcaatgagctgagatcacgccactacactccagcctgggccacagagcgagactccgtctcaaaagtaaacaaacaaataaataataaataaataaataaagggaaagtgccacaattttggatgaagggggttgagggactttacgtcaggtccaggacttggattacagagacacaatggggctagattcccagagatggataagattaaactcatataagtcgttttgctgacagaaggaccttgtttggaaaaagcgttttcagaataataaagttcctgagctcttcagaaaagtattttattgtcctgtaaccacagtaacaagtagccaccaaaactgatttttaacccatcatcaatgacaactcatctctgtgaagatgctctttttttttttttttttttttgagacggggtcttgctctgtcacccaggctggggagcagtgacgtgacctcggctccctgcaacctctctttcccgggttcagcaattctcctgcctcagcctccccagtagctgggattataggcacctgccaccacacgcagataatttttgtatttttagtacagacgggtttcgccatgttggccaagctggtcacaaacttctgacctcagggtgatctgcctgcctcagcctctcaaagtgctgggattacaggagtgagccacaaagcccggccactccatacgttttatattgttatgttaccatcagtcaggcagctccttgcttctaaaagtcatccaatcagactcatttcagtaaacacccaagcatgagtgacaaccaatcaaagtaatatcttcccaatgaccacacttttccagatgacgtcaagccacagaaggccctgaaaatccaacaatctctgaagtatacatttcccaggctgagcgcagtggctcacacctgaaatcccagcactttgggaggctaaggcaggcagatcacgaggccaggagttcgagaccagcctggccaacatggcaaaaccccgtctctactaaaaatacaaaaattagccaggtgtggtggcacgcacctgcattaccagctactgaggaggctgaggcaggagaatggcttgaacccaggaggcggaggttgcagtgagccaagatcgtaccaccgcactccagccttggtgacagagcaagactccatctcaacaacaacaacaaaaatggttgaaataaaacttctatgtgttgaacgattcctcttttaggcatagagtttcagttttacaagatgaaaatattctggagatctgtttcaaaacaccgtgaatacatttaacactgctatactgtacacttacaatggctaagatggtaaattgtatgttatgtttttactacaatttttttttttttttttctgagacagagtctcactcttgttgcccaggctggagtgcaatggtgcggtctcggctcaccgcaacctccgcctcctgggctcaagccattctcctgcctcagcctccagagcagctgggattacaggcatgcgccaccacgcctggctaattttatatttttagaagagacggggtttctccatgttggtcaggctggtctcgaactctggacctcaggtgatccacccgccttggcctcccaaagtgctgggatcacaggcgtgagccaccacgcctggcctacaatttttttttaacttttttttctgagatggagtctcgctcttgtcacccaagttggagtgcagtagtgtgatctcggctcactgcaacctctgcctccctggttcaagggattctcctgcctcaacctcccaagtgtgggagatcagtcagagtagcagaagaaattataggaataggaagcagcaaaccttcttggaaggccagggaggttggcatagcttcagatagtttggctgaaagcagccagattctcttttcaggagccaaacagcttagggcgcagatacaaaggaatgcggagtattttatctaaatagcttgcttagtcatatggtcctaaaatcaacctttgatcattctcgggcaagatggccctctccagggaggtggcggggggcggtgaccaggttaattacccacaggtgtgttgactcaaagcctttgttaattaaatctgtgctaaataaatgcaagcgttgccagcttagaggggctgcactctctttggctcctagtgccggcagccccctggcctgctctttcactgaatattggtgtctgaggacgtgtctcatctgtcgtacagctgggatctgcagaacagatcccccccgcacccaagaagctgggattacaggcacccgccgccatgcccagctcatttttgtatttttagtagagacagggtttcaccatgttggtcaggccggtctcgaactcccggcctcaggtgatctgcccgcctcagcctcccaaaagtgct[132 bp omitted]tcccaggttcaagtgattcccctgcctcagcctcccgagtagctggaactacaggtgcgcaccgccacgcccggctaatttcttgtattttcgtggagacggggtttcaccatgttggctaggctggtctgtttcatgcgcgtccgtgtgaagagaccaccaaacaggctctgtgtgagcaacaaggctgtttatttcacctgggtgcaggcaggctgagtccgacaagagagtcagcgaagggggataggggtggggccgttttataggatttgggtaggtaaaggaaaattacagtcaaaggggggttgttctttggtgggcaggagtggggggtcacaaggtgctcagtaggggagcttttgagtcaggatgaaccagaagaaggaatttcacaagataatgtcatcagttaaggcaggaacaggccattttcatttctttcgtggtggaatgtcatcagttaaggcaggaaccggccatctggatgtgtacgtgcaggtcacaggggatatgatggcttagcttgggctcagaggcctgacattcctgtcttcttatattaataagaaaaataaaacgaaatagtggtaaagtgttgggatggcgaaaattttggggggtggtatggagagagaatgggcgatgtttctcagggctgcttcgagcgggattaggggcggcgtgggaacctagagtgggagagattaagctgaaggaagattttgtggtaaggggtgatattgtgggattgttagaagaaacatttttcatttagaattactggtgatggcctggatgcagttttgtatgaattgaaaaactaaatggaataaggaaaggagaaaaacaggtattaaaggtctaagaattgggaggacctaggacatctaattagagagtgcctaaggaggttcagcatagccttgccagcaaagattatttatttacttcaagagttaagagtggtggtttggggatagcaccaggagatatcagctgtgatggcttggaaaaacagtgtaaaccagcagtgtaaacaagagcagggcatgtgtgagtagttgagaatggtgaataggagtatgactagacagaagatagtagggatgacaagtttttgggggcacattccaagttggtctggtgtctggaatgagactggggcttaataaaaaggagcgtctatacaggagctcaaatgggctgtaccctttagcattctgaggacaggcctgaattctgagaaaagaaagtggtaaaagtattgtccagtcttttttaagttggtggctgagcttggtgaggtgtgtttttaaaagactattagtctgttctacttttcctgaagactgaggactgtaagggatataaaggtttcactgaataccaagagcctgaaaaactgcttggctgatttgactaataaaggccggtctgctatcagactgtatagaggtgggaaggccaaactgtggaattatgtctgacagaagggaagaaatgacctcggtggccttctcagaccctgtgggaaaggcctctacccatccagtgaaagtgtctacccagaccaagaggtattttagtttcctgactcagggcatgtgagtaaagtcaatttgccagtcctaggcgggggcaaatccccgagcctgatgtgtagggaagggaggggacctgagcaatccctgaggggtagtagaatagcagatggaacactgagaagtggtttccttgaggatagatttccaggatggaaaggaaatgagaggttctaagagatgggctagcagcttgtaacctacatggaagaggctatgaaatatcgaccgaatagaatgggcctgtgaggctggaaggaggtattttccttggtctaagaaccatttgccttgtgtgggaagagattgatgggtggaagtttcagtgggggagtaggtgggagtgactgatgagaaggagaaaaactggctgtgggggacagaaattggcatgctagctgcttgtctagctaccttatcagcataagcatagatgtgagagacagaagttggaaagctagctgcttgtctagccaccttgtcagcataggcattgtctagagcaatgggatctgatgacttttgatggcctttgcagtgaatgactccagcttcctctgggagtaaagcggccttgagcagagtttttattaaggaggcattaaagatggaggacccttgtgtagtgaggaaacctctttcagcccatatgaccgcatggtggggcagaatatgaaaggcatatttagagtcagtataaatattgatgcatagtccttttgcatcagtgagggcttgagttaaggcaactaattcggcttgctgagaggtagtggagggggcagagcggtagcctcaatgatagatgtggaagatactatagcatagcctgcctttgctggtgagtggcgattaggcctggtggaactgccatcaataaactaaatgtgattagggtgaggaataggaaagaaggaaatgtggggaaatggggtgaatgtcaggtggatcagagagatacagtcatgggggtcaggtgtggtatccggaataatgtgggaggccggattgaagtatgggccagtaacaatggtaattgtgggagactcaacaaagagtgagtacagctgaaggagccggggagcagaaagtatatgcgtcaggtgtgaggaagaaaatagatttttggaagttatgagaactgtagagagtgagttgagcatagtttgtgattttgagggcctctaaaactattaaagcagcggcagccgctgctcacagacgtgagggctaggctaaaacagtaagatcaagttgtttggacagaaaggctacagggtgcggtcctggctcttgtgtaagagttctgaccacgctaaccatgcctaggaaggaaaggagttgttgttttgtagaaggtgctggggtttgagagatcactaggacacgattggcagggagagcacgtgtgtttttatgagaattatgccgagataggtaacagaggaggaagaaatttgggcttgactgaagtaatgggggctgtctgtgaagccttgcagcagtacagcctaggtaatttgctgagcttgatcggtgtcagggtcagtccaagtgaaagcgaagagaggctgggatgaagggtgcaaaggaacagtaaagaaagcatgtttgagatccagaacagaataatgggttgtagaggcaggtattgaggataggagagtatatgggtttggcactacggggtggataggcaaaacaatttggttgataaggtgcagatcctgaactaatgtgtaagccttgtctggttttaggacaggtaaaatgggagaattgtaaggggagtttataggctttaaaaggccatgctgtagcaggctttaatccttttaaagcatgctgtgggatgggatattggcattgagcggggtaaggttgattaggttttaatgagatggtaaggggtgcatgattggtcaccaaggagggagtagaggtatcctatacttgtgggttaaggtggggggatacaagaggaggacacaaaggaggctttggattgggaagaagggcagcaatgagatatagctgtagtccaggaatagtcagggaagcagataatttagttaaagtgtctcagcctaataagggaactgggcaggtggggataactaaaaaggagtgcttgaaagagtattgtctaagttggcaccagagttggggagttttaagaggtttagaagcctagctgtcaatacctacaacagttatggaggcaagagaaacaggcccttgaaaagaaggtaatgtggagtgggtagcctccatattgattaagaaggggacgggcttaccttccactgtgagagttacctagactgtctgtgatggtcctgtaggcttccgaggcgatcgggatcgggcagtgtcagtcttcagctgctaagccgagaagatctgggaaggagtcagagagccttgggccagagttctagctgctctgggagtggctgccaggtgagttgaacagtccgattttcagtggggtcccgcacagatgggatgcggcttaggaggaatcccaggctgtggacattccttggcccagtggccagatttccagtacttgtagcaagctcctgggggaagaggttctggaggaacccctggcagctgcggttcaggcgtttggagttctcgtgtgctggagatgtggctggggtttgtctcatctggatactggagtggaggcaaggaattgcaactcagaaatatgttgctatttggctgcctctactctattactgtacaccttgaaggcgaggttaattaagtcttgttgtggggtttgagggacagaatttaatttttggagctttatttaatgttgggagcagatttggtaataaaatgtatattgagaataagacggccttttgacttagggtctagggctgtaaagcgtctcagggttgctgccaaatgagccatgaactgggctgtgtttttaaatttgatgaaaaagagcctaaacactatctgatttgggagaggtcagataaagaaaaaggagcattaaccttgactatgcctttagcttcagccacctttttaagaggaaattgctgggcagttgggggagggctagtcatggaatggaactgtaagctggaccgggtgtgaggaggggaggtgataaaaggattatagggtggaggagcggaggctgaggaagaattgggacccagctcggcctggcgaggaggggagatgtcagatgggtctgtagaaaaggaagattagaaagactcagcgatgcttggggttgggactgacgggacaggcgggagggaaagaaggaagatttgggacgagttgcactgggcatagagactagggagggaccgatgtgtaaaagaatgcctggatgtcaggcacctcagaccgtttgcccattttacaacaagaattatttagatcttgtaggatggaaaaattgaaagtgccgttttctggctatttggaaccactgtcaagtttgtattggggtcaagcagcattgcagaagaaaataaggcatttaggttttaggtcaggtgtgagttgaagaggttttaggtttttaagaacacaggctaagggagaagaaggaggaatggagggtggaaggttgcccatactgaaggaggcaagcacagagaaaagagagagtagagacatggagggaaggggttcaggggttcttaccttccagaaaagcgggaaaggggtcagggcacagaagtaagggattggggtgcagagacaagaggtcggggtgtggaaataagggatcggggtgcagagataagacgtcagggcacagaaataagggatcgggggattcttgccccctagaaaagcggtacttgccactaagggtgaaggagaaggggttggggggttcttgcccccccagaaaagcagagaaggggtagagacacagagaaggagttgggggttcttgcccccccagaaaagcagtacttgccactaagggtgaaggaccaaggcaggcatccccatgtggtcagacacctctgaaacgtgggtgaataatcagagaggtgtccccgcgtgattaaacaccaagggaaggctgccttcccgagtccatgaccggcgctggagttttgggtccacgaataaagcgcgtctcctgtctctaccagaaaaggaaaggaactgaaattaagagaagggagagattgaagagtggaaaggagaaagtggttgagggatagtgagagaggttggagaagagagtaaaaagaggctgcttactggatttaaaattggtgagatgttccttgggctggttggtctgaggacgagaggtcgtaggtggatctttctcatggagcaaagagcaggaggacaggggattgatctcctaaggaagatcccctgattcgagttatggcaccaaatttcactcacgtccgtgtgaagagaccaccaaacaggatttgtgtgagcaacaaggctgtttatttcacctgggtgcaggcgggctgagtccagaaagagagtcagcaaagggagataggagtgcggccgttttataggatttgggtaggtaaaggaaaattacagtcaaaagggggttgttctctggcgggcaggagtggggttcacaaggtgctcagtaggggagcttttgagccgggatgagccaggagaaggaatttcataagataatgtcatcacttaaggcaagaacaggccattttcatttctttcgtggtggaatgtcatcagttaaggcaggaaccggccatctggatgtgtacatacaggccacagggggatatgatggcttagct[132 bp omitted]gttatgtgtattttgccacaatttttgaaaagtaccttctggtgtttagagacagaagatgagtggttgcctagggccgggagagtgaggggatcgtggtgatgggcagctggtcggcatggggttctgaagggcagtgatgacaacattctaaaattagactgtgttgacggttgcaccaactccgtgaataccacaaaatttaaaccattgaattatgcacttttaatgggtaattgtatggcat[146 bp omitted]gaaaccccatctctactttgaaaaaaaaaaaaaaagattacccggacgtggtggtgggcacctgtagtcctagctactcaggaggctgaggcaggagaatggcataaactcgggaggcagagcttgcagtgagtcgagattgcgccactcaggaggctgaggcaagagaatggcataaaccccggaggcagagcttgcagagagccgagattgcgccactgcactccagcatgggtgacagagcgagagtccatctcaaaaaaaaaaaaaaaaaaaaaaaagattagtaatatcctctgtgtcacttaccacttaagtgattgaatcacgacttgaaattcatcatctcaaacatggcttagagtctgtagaggggggacagtcccaggaatgctggtgtgggcttaaggctgaattaaatagatccagatggctcacacctgtaatcccaataccttgggaggccgaggcaggtgggaggctgaggcaggcggatcactggagctcctggagcgaagaaaggatgctagtggaaaaactggtgaaatcagaataaagtctatagttttattttttaaaggaggctgggcgtggtggctcatgcctctaatcccagcactttgggaggctgaggcaggtggatcagttgagttcaggagttcaaaaccagcctggccaacttgacgaaaccccatctctactagaaatacaaaaattagctgggcgtggttgtgggtgcctctaatcccagctactcaggaagctgaggcaagagaattgcttgaacccaggaggcggaggttgcagtgagctgagatcacaccattgcactccagcctgggctacagagcaagattccatctccaaataagagagacatgacaattaaataaattgtgtaatcttggattaaatcctaaaccaaatatatgtcactggtaaaacaagtggtgaaatttgaataaagtggatagatcagacaatagtgtcatatcagtgctatttcttgaccttgaacattaataacagaatgtccttggttttgggaaatataacctgaagtgattagaggtttagggcatcatatgcaaattagacacactttcttcggggagagagggagagggagagaggctgaatgatgaagcaaatgtggtaaaatgctaactttggggaaatctggatgaagaaattacagattttttttttttttatagacagggtaacactctgtcacccaggctagagtgcagtggcacgatcatggctcactgcagcttctacctccctgggctcagatgaccctctcacctcagcctcccaagtagctgggactataggcgcacagcaccacacctggc[131 bp omitted]tggaattatgtcaaaattaaaagctcaaaataataaaagacaatattcttatatttctttggtgaaggtaactatgttatggctgagagggtggctgaggtctgaggatccagcctacataagtctcctccatagagggcatccaagcgctccgtagggggaaggataaagaaaacacccagagttatgacagctgtgtaaggggaaacgcc[137 bp omitted]catggggaaaccctgtctctactaaaaatacaaaaattagtcgagtgtggtggcacacgcctgtaatcccagctacttgggaggctagaacaggagaattgcttgaacccaggaggtgaaggttgcagtgagctgagattgcaccactgcaccccagcttgagggacagagtgagattccgtcttaaagagaaaaaaaaaagaattagcacatttgtttgcctcaagaagatacaactagtcttgtacagtagtcacatgtatccaccaggatatattccaaggccccagtggatgctgaaaactacatagtaccttacatgtatatatatatgtatatacatatatacacatatacgtatatgtatacatacatgtatatatacatgtatgtatatacatatatgcatatatacatacatgtatatatacatgtatgtatatacatatatgtatatgtatgtatacacgcatacatgtatgtatacacgcatacatgtatgtatatacatatatgtatgtatacacggatacatgtatgtatatacatatatgtatgtatacacgcatacatgtgtgtatacatatatatgcatgtatgcatgtgtgtatatatacatatatgtgtatatatacgcatatacatgtatgtgtatatatgcatgtgtatatatacatgtacggtactatgcagtatatatacacatatatgtatatatgtatacatatatgtataaatgtatatatgtgtatatatataaaaggtatatatgtatatatgtgtgtatatataaaatgcatgaatttcttttttcttactgtagatcttaacaacttctgcatagaatttttttttattaagtggagagttagttacttacttaaaagaaatgtttcttggctgggtgtggtggctcacacctgtaatcccagcactttgagaggccgaggcaggaagattcacttgaggtgaggagttggagaccatcctggccaacgtggtaaaaaccggtctctactaaaagtacaaaaatgagctgggcgtggtgttgggtgtctgtagtcccagctactcaggtggctgaggcaggagaattgcttgaacccacaaggcagaggttgcagtgagctgagatcacaccactgcaccacagcctgggcaacagagcaagactctgtctcaaaaaaaaaaaaaaaaaagaaagaaaaagaaaaagaaaagaaatgtttcttttcttattaagttctttaaatgaaaagcttttcttttcacttttattttattgaaacattataacactatctttgaagaagatagtgttatcattccattctgatgaaaccaattaacttatccaagcatatgtatactgtacacagagaagccaacgtcaaaacccctatttttatctttttagattcagcagatacatgtgcaggttttttatgagtatattgcatgatgctgaggcttgcattaatgatctagtcaccaaataggtagattttcaagccttgctcccctccttacccaatgtttagcgctctcacttataagtgagaacatgtggtatttggttttcttttcttttttttttttttttttgagatggagtttcactcttgttgcccaggctggagtacaatggcaccatctcggctcactgcaaccttcaccttccaggttcaagcaattctcctgcctcagcctcccgagtagttgggactacaggcatgtgccaccacacccggctaattttgaatttttagtagagacagggtttctgcatgttggtcaggctggtctcgaactcccgacctaaggtgatccacctgcctcagcctcccaaagtgctgggatgacaggcctgagccaccgtgtctggccagtatttggttttctgtttctgtgttaactcgcttaggataatggcctctagctgcatccatgttgctgcaaaggacataatcttgtgatttttcaaggctgtatagcgttctgtggtgtatacatatcacattgtctttatccagtccacctctgatgggacctgggtggattccatgtcttcactattgtgaatcctgctgcaatgaacatacaagtgcatgtgtctttttggtagaatgatttattttcctttggctatatacccagcgatgggattgctgggctgaatggtaactctgtttgtagttctctgaaatatctccaaaccaaactgctttccacagtggctgaactaatttacacccaccaacagtgtataagtgtcccctttgctccacaatctcaccagcatctgttaatttctggcttttcagtaatggccattctgactggtgtgagatggtattgttgagggataatttaggaatcagagagaccgaggggttgaggaggatttattattattattattatttaggtgcaccggccccagtcagattaacatccaaaaagactgaggctcgaacagagagtccggttaccttttaagcattttgtggggttgggggagatctgtgcagggggaagcatattacagaagcaagaaacaaaggcagttattcaattgagacatgcatcacattattccttacttttcaagaaaaatatgttttacgacttgaggttatcctgtctagtgaccttgcagccgcacggcaagagaaacagggtcttcacaatgcctgggaaagggagagataaggctcactagccacagacagaaaaacaggcagttcatgtttaaaggactccacctctttctcttcctcggggggaactgggttttcttaaatacaactgagtttttgtttacacattctgtaatttcttttaattcctgttccagtatctcactgtgaaactccctatgtttttatacgattctcagggggtttcctctgggcatgattgggcacaacttcccacagtcagctctgggtacgacctccacattgcagaattgagaagttgacccagaaatgcattttgggctgagcagacaattgtcagagttgctggctagaccacagatgtgtcagagggaccacggcctttctgtaagctcatggtcagaggcggaggggagttgtgaacgttctgatgaaagcagtcaacgtgaaagcgctctggtgatgggcgctggtgctcacccaccacttcctgtgtatctatctccctggcccgcccggctcagtccccactgctcagcactaggccggcagaatctgagcgatgtcttccacactccctgccctgctctgcgtcggtgagttctggcgtggaaggggaatgggatcacggtgtgcctgggaggcaacaggtctcattactcccgtcttccagggctgtgtctgagtcagaggatcagcgcccagcagcgtgagtccttccttcaaagcccagggtcactcttccggattcaggccaagctccttccacccaagcacggctggggtgaggggacagggtgctggcttcccaggagagcttggggccagcagctgggtggagcctaaggttggggggagggggctccgctggaactccagcctctgattcccttccagagactctcccaaaaccgttcatctgggccgagccccatttcatggttccaaaggaaaagcaagtgaccatctgttgccagggaaattatggggctgttgaataccagctgcactttgaaggaagcctttttgccgtggacagaccaaaaccccctgagcggattaacaaagtccaattctacatcccggacatgaactcccgcatggcagggcaatacagctgcatctatcgggttggggagctctggtcagagcccagcaacttgctggatctggtggtaacaggtaactgtccggttctctaactggagagtgatctcagtctgcatccgggatgcagcatcatctatgaactcttccaagccccactcagacactgcttgtctcggtaggaggctggaaggaggggtgatccccatcacaatccttgcctacaaggggttgtctgcagaccgtgtctctacgtcctaggagcagatgtgtcctcagtcagtttctccatgacacagattctgagatagatatttgtatgcaggggtatgactgaggaatgtcctcaaaaacaatgcctgtgggccaggcgcagtggcttacactttgcttccctcacccatcacaggtggtgggttttttttttttttatctgttttgagacggagtttcgctcttgtcacccaggctggagtgcagtggtgcaatctccagtcactgcaacctccacctcctgggttcaagtgattctccagcctcagcttcccaagtagctgggatcacaggcacccaccactacgccacattttgtatttttagtagagatggggtttcaccatgttggccagggtggtgtcgaactcctgacctcagatgatccgcccgcctcaccctcccaaagtgctgggattacaggtgtgagccatcacacccagccaggtggtggttttctaaaaaaaaaaaaaaattagcttttttttttttttaacaatatggttgtttattattattatcaagtattatacatagttacatatacatacataattgtatgtgctatacaattaggtttgtttataccagcaacaccaaaaacacatgagcaatactttgtgctaggaaggctatgatgtcatcaggcaataggaatttttcagtttcattataatcttatgggaccaccatcatatatgtggtacattgttggccaaaatgtcattatgcagctcacaacagtatttcatgtccattcaaatatcttcttttgtgaaatgtctatttaaatcttttgcctatttttaaattgggttgcttatattttgattgattaggaaaagttatttctatattctgtgtcatatacttgtgttgaaatatatatattttttgtctgtgccttttcatttgctcagggtctttggaccttgtttggaggttctggcaggggaacacagctactcatttattcttttttttttaatttttttagtatttattgatcattcttgggtgtttctcggagagggggatttggcagggtcataggacaatagtggagagaaggtcagcagataaacatgtgaacaaaggtctctggctttcctaggcagaggtccctgcggccttccgcagtgtttgtgtccctgggtacttgagattagggagtggtgatgactcttaaggagcatgctgccttcaagcatctgtttaacaaagcacatcttgcaccgcccttaatccatttaaccctgagtggacacagcacatgtttcagagagcacggggttgggggtaaggtcatagattaacagcatcccaaagcagaagaatttgtcttagtacagaacaaaatggagtctcctatgtctacttctttctacacagacacagtaacaatctgatctctctttcttttccccacatttcccctttttctattcgacaaaaccgccatcgtcatcatggcccgttctcaatgagctgttgggtacacctcccagacggggtggcggccgggcagaggggctcctcacttcccagacggggcggccgggcagaggcgcccccccacctcccagacggggcagtggccgggcgggggctgccccccaacctcccggacggggcggctggccggggcttttttttttttttttgagacagtctcgctgcagtgcagtggtacaatctcagctcactgcaacctctgcctcagcctcaattctcctgcctcagcctcccaagtagttgagattacaggcatgtgccaccacacccggctaatttttgcatttttagtagagacggggtttcaccatgttgaccaggctggtctcaaactcctgacccaggaggtcgaggcttcagtaagcaaagatagtgccacggcgctccagcctgggaaacagagcaagaccctgtatcatttttaaaaatggttttagacggtaaatcttctattgtgtgtatttgaccaaaataataattaaaaaaaaaaaaaaaagctggctgccaggcatggtggcaggcccctgtagtcccagctacttgggagggtgaggcaggagaaacgcttgaacccgggaggcggaggttgcagtgagccaagatcgtgtcactgcactccagcctgggcgacagagagagactccatctctaaagaaagaaaaaaaaaaatagctggctgctcatcactgagtttctggtgtggtggccccaccttctctcatagaaatgtatgacacacccaccctctcggttcatcctggacccgaagtgatctcgggagagaaggtgaccttctactgccgtctagacactgcaacaagcatgttcttactgctcaaggagggaagatccagccacgtacagcgcggatacgggaaggtccaggcggagttccccctgggccctgtgaccacagcccacagagggacataccgatgttttggctcctataacaaccatgcctggtctttccccagtgagccagtgaagctcctggtcacaggtgaggaaatgctcaattccccacacccttcgccgccatgtgctacctggagccctgagggatccccagagagtgatggggagggtgtccaagggacgtccacttcctgggtgcctggttggtcatgtgaggaagaacaccagaagcaggaaggaggagggaacagagaaaggaatggtaaggcgggtggatcacaaggtcaggagttcgagaccagcctggccaagacggtgaaaccccgtctctactaaaaatacagaaattagccagacgcagtggcggacacctgtagtcccagctactcaggaggctgaggcaggagaatcgcttgaacccgggaggcgggggttgtagtgaaccgagatcataccaccgcactgcaacctgggcgacagagcaagactccatctcaaaaaaaaaaaaaaaaaaaaaagaatggcaagaccggaggaaaccaaaaacccttacttttttttctttatctccttttccaggcgacattgagaacaccagccttgcacctgaagaccccacctttcctggtgagtaactggtccttctaagctcagacgagcgatcagagcctcccag[141 bp omitted]cgaaaccctgtctctactaaaaatacaaaacttaggctgggcatcatggctcacacctgtaatcccaacacttcgggaggccaaggtggttggatcacaaggtcaggaattcgagaccagcctgaccaacatggtgaaaccccatctctactaaaaatacaaaaattagccgggcctggtggtgctcgcctgtaatcccagctactcaggaggctgaggcaggagaattgttgaacctgggatgcagaggttgcagtgagctgagatcgcgccactgcattccactccactgcacgacacagcgagactccatctcacagaaaaacaaaaacaaaactattatatatatatattcatcaagtgcatagtatacacagtgaactacactgtaacagtcagccaggcagatatcttgactgtgcagcacttagattctagcaggaggagacacaccatcggtcaacgtcaggatagcacacaggagggaatgatgctatggaaggaaaagacaaagtagaacagacttacagtgattgaaatggcagctagcaatattaaataggtttgtccagatggacctcacagagaaagaaggcatctgagcaaatgcgttcagacttgagttaatcatgtggctgtcaggagaaaggaggctctggagagaatgaaatggcatctgcctgtgccctggggcaggaagataactggggtaatacaataataactatgaggccaggagggttgaaaatgatgtttggaagatgacg[136 bp omitted]acacggtgaaaccctgtctctactaaaaaaaaatacaaaaattatccgggcgtggtggcgggcgcctgtagtcccagctacgcaagaggc[136 bp omitted]atagtgagactttgaatttcactatgtgtgaggagaaagaggtaatgatgacttaatgaggaaaatgaggcttaaatagaagacgggctgggccgggtggctcctgcatgtaatcccagcactttggaaggcaggggcggctggatcacttgaggtcaggagttcaagaccagcctggccaacacagtgaaaccccatctctactaaaaatacaaacatgagttgggtgtggtggcgcacgccagtaattacagctactcggggctgaagcaagaggattgcttgaactcgggaggcggaggttgcagtgagctgagatcacaccactgtactccagcctcagaggcctgccatcccagccctttgggaggccgaagcaggcaggtcatctgaggttgggagttcaagaccagcctggccaacatggcaaaaccccgtttctactaaaaatatgaaaaaaattacctgggtatgtggtgtgtgcctgtagtcccagctactccagaggctggaacacagtgagactctatctcaaaaaaaaaaaaaatagaagacatgactggtgcaaagacacatgctcacaagtgctagaatggaattcctcgtcaggttcgtccatctgtggacccttccactttacctgctggatgaagctcctgggacccgcagggtgaggtgggaccttgtaaagctgcagaacgtcatggggtagacccaagggaaggagtgctggggtggaggaggtcaaaaccatcctcttttcttcacttcccttatcatcagcagacacttggggcacctaccttttaaccacagagacgggactccagaaaggtaagtagacagctggggccataggctctgaaggaaggggctgggcatagagtagacctaggaagggaatctaaatgggaacaagagggtgtccttggccaggcgcagtagctcacacctgtaatctcagccctttgggaggccgaggcgggcagatcatctgaggtcgggagttcaagaccagtctggccaacatggcgaaatcccatctctactaaaaatacaaaaaaattagccaggcgtggtggcgtgtgcctgtagtcccagctacttgggaggctgagacaggagaatagcttgaacccaggaagtggaggttgca[134 bp omitted]ttctcctgcctacagaccatgccctctgggatcacactgcccagaatctccttcggatgggcctggcctttctagtcctggtggctctagtgtggttcctggttgaagactggctcagcaggaagaggactagagagcgagccagcagagcttccacttgggaaggcaggagaaggctgaacacacagactctttgaagaatgaccatgagacacagtggccatgggtggatctgaaagctggtgttgagcctgggcggcgtgagctctgtgttggacccacggaggagggagtcactgcagggaaagagggacactggcattccatttgtcagagcatcccggacgatgcagagggtgggagaactacatgctaaatttctttttttttttttttgagacagagttttctcttgttgcccaggctggagtgcaatggcgcgatcttggctcactgcaacctctagctctccatccctcgggttcaagtgattctcctgcctcagcctcctgagtagctgggattacaggcatgtgccaccaccccagctaattttgtatttttagtggagacggggtttctccctgttggctggtctcgaactcctgacctcaagtgatctccccgccttggcctcccaaagggctgggattacaggcataagccgctgcgcccagccactgaatttcttctgtagacaaatcctatggtctcttctaggctctaactatttttgtaccacttactgcaaaccatacttttaaccactctggtcttttctgaaaagatctctccttctttaacaggatggccatggaaatatttttttcctactttggtctttttttctttcctttctctgcaggaagccattcaaaatagttaataaccaatatagaataggtctgtatcaaatggttcaggaggcattgtggcaacaaccagttgtagagaagcagctttataagtgaatcctgccaggcacggtggctcacacctgtaatcccaacactttgggaggctgaggcgggcagatcacctgaggtcaggagttcgagaccagcctggccaacatgatgaaaccccatctctactaaaaatacaaaaactcggccaggcacggtggctcatgcctgtaatcccagcactttgggaggccaaggtgggaggatcacctgaggtcaggagttcgagagcagcctggccaacatggtgaaaccacatctctactaaaaatataaaaattagccaggtatggtggcgtgtgcttgtaatcccagctactcaggaggctgaggcaggagaatagcttgaacccgggaggcggaggctgcagggagccaagatcgcaccactgcactccagcctacgtgacagagcaagattctgtctcaaaaaaaaaaagaaaaaaaaaaaataagtgactcctggctgcatcccaaccataccccaattccttctaaccacagaattattccatcttctcttccttttttttttttttctttttttttgtttgttttgttgggacagaatttcactttttttttttttaatgtaagttttagggtacatgtgcacaacgtgcaggttagttacatatgtatacatgtgccatgttggtgtgctgcacccactaactcgtcatttaacattaggtatatctcctaatgctatcccttcccccgagtttcacttttgtcacccaggctggaatgcagtggtgcaatcttggctcactgccacctccacctccagggttcaaatgattctcctgcctcagcctcctgaatagctgggattataggcatgcaccaccacgcccggctaatttttgtatttttagtagaaatggggtttcacaatgttggccagactggtcttgaactcctgacctcaggtgatccaccagcctcggcctcccaaagtgctggaattacaggtgtgagtcaccgtacccggccaccatctttgcttctttatccacaccttgccttgttcttcagggctctgcagagatatcatttcctccaagagtttccacaactccgacttcacaaagatagcacttttttttttttttttgagacagtctcactctgtagcccaagctggcgtgcagtggcacaatctcagctcactgcaaccttcgcctctggggctcaagcgattctccttcctcagcctcccaagtagctgggactagaggcgcgcgccaccacacccggttaattttttttgcatctttagtagaggtagggtttcatcatgttgccctgggtggtctcaaactcctgagttcaggtgatccccccgccttggcctctcaaagtgctaggattacaggcgtgagccactgcgcccagccaagacaacactttcctcatcccaaagcacctgttaattccctgtaacagcacttgaaccctgattcggcatgcatgtccattttcctgcctctaccgtgaactcgtgtgaattgatctatgtcagatttagtggctgcattcacagctcccgcaactataacggggttctcgggaaatatatatcaaatgagtgaatgtatatacggggctgtggcacagcctgcaacttgagacttctcactaggggtcttgaaatgctgtctggacaccaccatcgctttcctccctgagaacttctacttatcaacccatttatatactcatcgcatgggtcctcacgccctcccattattctggtgcctcatgccggtcaaatttattctctaaatctgatttttccattaaatagcagcctggccaacacggtaaaaccccatctctactaaaaaatacaaaatattagccaggcgcagtggcttgcacccgtaatctcagctactcgggaggctgaggcagcagaatcacttgaacccgggaggcagaggttgtggtaagccgagattgcaccactgcactccagcctggtaacagagcgagactccctctcaaaataaataaactgctgactcgcgtattttttctttaccccaactcattccttacatgtaggcacctgtaatcctagctactcagaaggctgaggca[137 bp omitted]tctgctttactggttcagtaaaagccaggaaacacaactttgtggtaatctgaatgttattgaactgtattttgttcactttattgtaaatactagtgaacagtgaataaatggttgtatattcctaataagaaaaaaaaaaaaaaagacccaaagtacagcgagctgatgccgatctcatttcgcagaggtccgcctgctctcccctctccaagagtgtaatcctatgcttaataaacttatgccgctttgctatgtgtgtgtatcacacccaattctttgttcgaaacaccaagggcctggaacttcacagctttggctggtaacggggagcaggggtaaagacatttaaaagctgcttgtgttaaccataatcgccatcccatatatcagacccccagaactaactcatcttataactgaatattgtgctttttttttttttttttttttgagacgaagtcctgctctgtcacccaggctggagtgcagtggcgcgatcttgactctgcaacctccgcctcccgggttcaagcgattctcctgcctcagcctcccgagtagctgggactacaagtgcgtgccaccacgcccggctaatttttgtatttttagtagagacggggtttctccatgttggtctcaaactcctggtctcaggtgatccacccgccttggcctcccaaagtgctgggattacagacgtgagccaccacacccagctacttgtgctttttgaccaacatcttcctctcctaccacccccagcccctgataacctccacctactctcacttctaggagatcaactgttctatttttttttttttttttttttttttgagtctcgctctgcacacccaggctggagtgcagtgctgcaatctcggatcactgcaacctccgctttccgggttcaagcgattctcctgcctcagcctccagagtcgctgggattactgagccaccgcgcccagccagaagacccacgctccctaagacataacccacactggtggcctttgttctgacttctcacctgtgctccccacccgctagaaactggcttctctccccacacttcctctgaagctgtctgtgtgaccaacactaatgagcttccttcctggaacatgcagtgacccttttcagcccttctcattattgctcccccacagttgtatttgacacgttgaccacttcctcctcgaaggactcacttctctggctttctcggacacttcttgctactcgttttctgacggttacagtaccaacaggtttgcaggcacctccaccaccagagccaatcccagctactcgggaggctgaggcaggagaatcgttcaaacccgggaggcagaggttgcagtgagtcgagattgcgccactgcactccagcctgagtgacagactgtgactcctcaaaaaaaaacaaaaacaaaaacaaaaaaactacagtcttgctctgtcgcccaggatggaatgcagtggtgccatcttggctcactgcaacctctgcctgctggggtctagcgattctcctgcctcagccccccaaggagctgggactacaggcatgtgccgccacgcctggctaatttttgtatttttagtggagatgggggttttaccatgttagccaggttggtcttgaactcccgacctcatgtgatccgcccaccttggcctcccaaagtgcgaggattacaggcccccgcacccagcctaggatcctgcacctctctagcctagcagttctctgctgggtgattttgctctccactccaggggacatttggcaatgcccatggtaatttttaattgtcatgacttggggaggggttctactggcatctggtaggtagggtccaggggtgctgctcagcttcctacaatgcccagggcagccccagatggcagcagcaccaaggctgagaaacactggctcatgcagaaagcaaccaccttacacccttcagtgcagggacaaaggcagggttacgagtccacggaaactctccagtctcagcctacgtaagacgtggctatttttctttcttattgtttttattcatttatttttcttgagacagagtcttgctctgtcgcccaggctggactgcagtggcgcgatctctgctcactgcaagctccgcctcccggg[135 bp omitted]tctcaaagtgctgggattacaggtgtaagccaccgcacccggccttattcatttattttttgagatagagtctgagccctttattttatttatttagagaccaagtctcgctctgttacccaggctggagtgcagtgtcgtggcctcagctcactgcaacaacctccgcctcccgggttcaagcgattctcccaccttggcctcccaaagtgctggcattacagacacccactaccatgcctggctaattttttgtacttttagtaagtaaagacagggtttcaccatcttggtcaggatggtctcgaactcctggcctcaagtgatcggcccgcctgggtctcccaaagtgatgagattacaggcgtgagcgaccacactggcctaatgtgtagttttttatctgtggcctcccttctgccctcccccttctgagactctgaagcccattacatcactctgcctttgtgtaccaacagcttagctcccactgagaacatacagagccaggcacggtggcggtggctcacgcctgtaatcccatcactttgggggtgctgaggcaggtgtatcgcctgaggccaggagttcaagaccagtctggccaacatggtgaaaccccatctctactaaaaatagaaaaatacatagctgggtgtggtggcacgtgcctataatcccagctactagggaggctgaggttggagaatcgcttgaacccaggaggcggaggttgcggtgagccaagatcacaccattgcactctagcctgggcaacaagagcaaaactgtcttaaaaaaaaaaaaaaaaagtgagaacatatggattctactcctgttagaataatggcctccagctccatccaaattgctggaaatgacattatttcattccttctaatggctgaatagtattccatggtacatagacaccacgttttctttatccactgtagggaccagccccacagggtcggtgggtctctccctgtgtgcggcgacgagagagtgtagaaataaagacacaagacaaagagacaagagaaaaggcagctgggcccgggggaccactaccaccaatgcgcggagaccggtagtggccccgaatgtctggctgcgctgttatttattggatacaaggcagaaggggcagggtaaagagtgtgagtcacctccaatgataggtaaggtcacgtgggtcacgtgtccactggacagggggcccttccctgcctggcagccgaggcagagagggagaggagacagagagaaagacagcttacgccattatttctgcatatcagggactattagtactttccctaatttactactgctatctagaaggcagagccaggtgtacaggatggaacatgaaggcggactaggagcgtgaccaccgaagcacagcatcacagggagacggttaggcctccggataactgcgggcgagcctgactgatgtcaggccctccacaagaggtggaggagcagagtcttctctaaactcccccggggaaagggagacccccccccccacccgctgcccctttcccggtctgctaagtagcgggtgttgttaattgacaccttttgctaccgctggaccatgatccgcttggtgacgggtgtcttcccagacgctggcgtcaccgctagaccaaggagccctctggtggccctgtccgggcataacagaaggctcgcactcttgtcttctggtcacacctcactatgtcccctcagctcctatctctgtatggcctggtttttcctaggctatgattatagagtgaggattattataatattggaataaaaagtaattgctaccggctaatgattaatgatactcatatataatcatatctaagatctatatctggtataacaattcttgttttatattttattatactggaacagctcgtgtcctctgtctcttgcctcggtgcctgggtgccttgccgcccacaatccactcattattcaatgggcacttcggttggttccacatctttgcaattgtgaatggctgagccagccattcttaactgggggtgattttgtccccatgggggtatctggccacatcccgagaggttttttggttgtcacgagttgcagtgggggcaggctcaggctcatccaagtccaggggtgctgctatacatcacgtgatacacaggacagtccttgctacggactgaattggtcccaccaaacgtcatgtacaagccctaccccagatgtgactctatttggacacagggcttttcagaggtaattaaggctggtcaggcgccgtaatcacagcactttaggagttctgtgtttattactggtaagtgggtaagagcccagtgtggcagctcacgcgtgtaatcccagcactttgggaagcgaaggcaaggggataactggaggccagcagttcaagacaagcctggtcaatacagcaagactccatctctataaaatattttaaaattagccaagcatgtttggcatgcacctgtaatcccagctcaggaggctcaggtgggaggattccttgagtttaaggctgcagtgagctaagatcgcaccattgcactccaacccggctgtgggcaacacagcaccaccaccatcttggctgggcacggtggctcacgcctgtcatgccagcactttgggaggccgaggcgggtggctcacctgaggtcaggagtttgagactagcctggccaacatggtgaaatcacgccactgcactccagcctaggcaaccaagtgagactctgtccgccccaccaccccaccaaaaaaaagactactatcttaaacaaaatcaaaatttttaagtagataaaatatttaggggaaaaaaacttcaattaaatatgcagcagagtccgacccagatgttttcactcccagcctctacctactatctttgtgtctttatttttagcaaattctacacgggaacttcatgtgcatgtagaaccctaaatgttgactcagccctacctctcatcacctgaccacttcctttattcacgctgtctctaccacccttcccatcggtgtgagctgtatcccgctaaacactgttaccacccacagcctgcattactaccagctgactgtagccttaaacaccacagtgatctcgagcatttgagaagacttatcttgacaagggctcacgaaagacagcaatgctcaacagcaagataaatgagggccttcatgggatcattcagtgctgaagccactcaacctccaggtttgggttagtaaaaagaactttgtcaggccaggcacagtggctcacgcctgtcatcccagcactttgggaggccaaggcgggcagatcacctgaggtcaggagttcaagaccagcctggctaacatggtgaaacctcgtctttactaaaaatacaaaaattagccaggcatggtgacgcacacctctagtctcagctactccggaggctgggacagaagactcacttgaacccaggaggcagaggttgtagtgagccaagatcgcaccactgcactccagcctgggcgacagaggcaagactccatctcaaaaaaaaaaaaaaaaaaaaaaagaaaagaaaactttgtcatacaagctttcaacctaaagcattagccatatgcccgtgtttttgtgcctgggaccatgacaactttccccatatcaatgctcttattttttttttttcgagacaagagttttgctcttattgcccaggctggagtgcagtggcacaatctcagctcaccgcaaactccgcctcccgggttcaagcgattctcctgcctcagcctcccgagtagctgggattacaggcatacaccaccccacccggctaattttgtatttttagtagagacgg[135 bp omitted]cgcaagcgtggagagccaagtgaggagaggggtcagtcccttttggcagcgcctggaagccagtgctaacatcatggtgacaacttttcattcttaaggaaaattgcggagtgacttctatgcattttctatgaatgaccaaatacagggtgtggaaaagctgtgtttgccatggcaatgggaagccgagagaaacggggaggcgagagagacagagacatacacagagactcccagagacagccacacagactcacacagaaacagacagacaggctgggctcggtggctcacgcctgtaatcccaccactctgggaggctgaggcgggtagatcacctgaggtcaggagtccgagaacagcctggccaacattgtgaaaccccgtctctagtaagaatacaaaaaattagccaggcatggtggcacagggctgtaattccggctactcggaaggctgaggcaggagaatcacttgaacctgggaggcgcggttgcagtgagctgagatcacgccattgcactccagcatgggcgacaagagtgaaactccgtctcaaaaaaaaaaacaaaaaaaaaaaacgaaagaacagagagacacatacaaagacagagatagaaacgcccagcgacagagacacacacagagaaacacagacagacacagagacacacacacagaaacagacacagagacagagagacaaaaagacagacacagagaaacaaagagagacacacagagacagagagagagagagacacatacacacacacacagagagtaggaggcggcccgtgggagccgagcagaaccagcgtgaggcagggccatcttctgaattaaaggcaacagtgactgtaagcttgtgctttgtgagtaacaggatagattagaacagggctggctgcccatggcccacgagctgtttctgggaagcctccgcaggtgccagccaggccctgcgctgcttccatgtccaaaggcacagctgagagctgatgagagaccgcggggcccacagtgccaagcatatgaactatctggcccgtttgtcaatgcgtgggttgatcacataagttatgatcacataagtcacaaagacacactgatcacatagatgcacctggcagatagtagaccacatggcgcctgagttagggaagaaaagaaatagaagaatcaaccgaatcatccctgaacttcttagcaatacttcctcctagacaaagcacagagtaccatgtttattgcaggtttgctcctgagcatgtcaataaacgcagctgcaacgagagtgctctaactttattatccctgtgagaaagtacatagcgtcatgtgaagggggtgcgtgactcgtgcagaatctcccaaaaatagtgagaaaaccagtgtcaaatcctacctctcgacagactctagtgttaacatgtgaccctctgacctgcattcataagacatcttagagacccgaatcccgcttcctgtgtaattcgtagagcgatcccaggctgctcagcaaaaaaagtcacagcacggaggtgccgttgccccggaagcattgcaatcaatagtcagcttgggattcttttctttcacttcctccaacagcttcttgatttccaaattagtttcataggtcttcaacctggagggatcagagaacacaaatgttcccagaaattcattctcaactacccaggatgcctgaatatctgttttcaaacactcaaagcaggaaacgtttttgggattttctgggggacagggtcttgctctgttgcccaggctggggtacagtggtgccatcttggctctctgcaacctccagctcccaagttcaagcaattctcatgcctcaggctcctgagtaactgtgattacaggtgtgcaccaccacgcttggctaagttttgtatttacagtagagatggggtttcgacatgttagccaggctggtctcgaacttctggcctcaagtgatccatccacctcggcctcccaaagccatgggattacagatgtgagccacagcacccagtcagaaaagttttctaaaaagaaatttagacccacacaatggggatccttataagtctaagaaaaaaaagattatggccaggcacggtgtctcgcacctgtagtcccagcactttgggaggccaaggcaggcagattgcttgagctccgcagttcaaggccagcctgggcaacacggtgaaaccctgtctctaccaaaaatagaaaaagttagccaggaatggtggtgcacgcctatagtcccagctactcgggaggcggaggcaagaggatcacttgagcccaggaggcggaggttgcaacgagctagagattgccctactgcactccagcctggtaacagagtaaaacatgcctttaaaaaataaatttaaaaaatagataatcaggctggtgcacggtgactcacgcctataattccagcactttgggaggccgag[132 bp omitted]gagacaggagaatcgctttgaacctgggaggcagatgttgcagtgagccaataccgcaccactgtactgcagcccgggtgacagagcgagactctgcctccaaataaataaataaaaaatagtggcaaatcaaaccttcagtagaactaagagaatgccagagtgaaccccagggttaatgatagcaaacttggctctaacgtggctgcagcatgcaagcctgtgtatgtgaacatgaggggtggtgattgtggagacactggcttgctatgttgcccaggctggtctcaaactcctggcctcaaacaatcctcccaccttggcctcccaaaggaggaactgaggaatgagaaaagaaatacgccccaaacatatgacataagagaccacagggggctagagatttgtcaccaatagtccttggtggcattacagacctcggtcccaccaacaagagaagcatgacactatttagctcaagtttcatgatatacccctaaaaccttaacccatttatgccagaggttacaattatttgaactgcagacgtgtgaaaaatcgtaccttgagcaggatataaataactcccacatgcttagcgttccaataatgcaacactgggcatcatgaagcagtttacatgcgtatcatctctacaactaaaataactcttgaataagacaagtgggctgtgcacagtggctcacgcctgcaatccgggtactttgtgaggccaagacaggaggatcgtttgaagccaggagtttgagaacctcggcaacacggccacacagtgcagcagagcaaaacgttgtctcagaaaagaaaagacaaaggc[144 bp omitted]tgaaaccccatctctactaaaaatacaaaaaattagccgggcgtggtggcgggcgcctgtagtcccagctgctcgggaggctgaggcaggagaatggcgtgaacccgggaggtggagcttgcagtgagccgagatcgcaccgcttcactccagcctgggcgacagagactggagtctctgtctcaaaaaaaagacagattcaaaaaaaaagacagactccgtctcaaaaaaaagactccgtctcaaaaaaaaataaaaaatacaaataagtcattgaaaagatatacacgggtcacaactaagggagcatctgtaggacgatcttctgaaaagctaagacccaggacagctctgggaactacctatttttggatataatgattaggggtgtgtgtgtgtgtgtgtgtgtgctcatgcacacacatacacacaagcttccagtctgtactccaggatgatttaaactctcagtatgcctaggactaagtgttttgggggaaagttggacaatattcaattcacagagcattttagaaaagtatctaatttttaaattatctcctaagctaggagtgtgctatagaaagatgccttaagttgatccctacaaagagtacacacactcccaaaaaaactcttctctgcatgggaaattcaccatgtgaaacagccatcccagggccgagcacagtggctcacgcctgtaatcccggcactttgagaggctgaggcaggtggatcacctgaggttgggagtttgagaccaacctgaccaacatggtgaaaccccatctctactaaaaactacaaaaattggccaggtgcagtggctcatgcctgtaatcccagcactttgggaggccaaggcgagaagatcacctgaggtcaggagctcgagaccagcctggccaacatggcaaaaccccatctctactaaaaatacaaaaattagctgggtgtggtggcgagcgactgtaatcctagctactcaggaggctgaggcaggagaatcacttgaacccaggaggcagaggttgcactgagccgagatagcgccactgcactccagcctgggggacagagagagactctgtctttaaaaaaaaaaaaaaaaaaaaaaaattagccagctgtggtggtgtgtacctgtaatcccagctactcaggaggttgaggcaggaaaatcgcttcaacctgtgagaaggaggctgcagtgagtcaagatcgcgccactgcactccagcctgggcaacagtgagactccatcccaaaaagcaaaaaccaaaaaggccgggtgcaatggctcacctctgtaatcccaccactttgggaggccgaggcaggtggctcacctgaggtcaggagttcaagactagcctggccaacatggtgaaacccctctctactaaaaaattagccaggcatggtggcaggcatctgtaattccagctacttgggaggccaaggtgggagaatcgcttgaacccaggaggtgggggttgcagtgagccaagatcgcaccactgcactccagcctgggctacaagaacaaaactccgtctcaaaaaaaaaaaaagaaaaagaaaaaaattagctggacatgttggcatgcctctaggcccagctactcatgaggctgaggcaggagaattgcttgaacctgagaggcagaggttgcggtgagccaagattgcgccactgcactccagcctgaatgacagagcacgactccatctcaaaaaaacaaaaacaaaaaacaaaacaaaacaaaacaaaaaacccatacctgagtatcttcaaggatccagttctttgtcttagaaccccaaagagcttaattatgccactcttccacaaatgattctggcccaggtccagagtttcaagcttctgattgctgaggagagcagatccaagatgctgacaatagaaaggcatgagggagcagctccagaggctgttgaggaagaacatggaaatccacgcattcactgagcaggtagtggctcaagcgtgtaatcccaacacttcgggaggccaaggcgggtggatcacttgaggccaggtgttcgagaccagccttgccaacacggtcaaaccccatctctactaaaaatacaaagattaggcagggcgtggggacagacacctgtagccccagcaccttgggaggccgaggagggtagatcacctgaggtcaggagttcgagaccagccaggccaacatggcaaaaccccatctctacaaaaaattagccatgcatggtggtgtgtgcctttaatgctagctacttgggaggctgaggcacaagaatcgcttcagcctgggaggcggaggttacagtgagcccagattgcgccactgcactccagcctgggcaatagaatgagactccatctcacaaatatataacataaaatgaaaatacaaaaattagccaggtatggtggaaccacctataattccagctactcgagaggcaggagaatcgcctgaaccaggaggcagaggttgtagttagccaacatatcaccactgcattccagcttgggtgaaagagtgagacttggtctcaaacaaaacaaaacaaaaaaacaagcagcatatttgctggggctccagtagtgaggaaaggcagaggggagtgagcagaagaaatccttgtcctcagagtttttagtgacagcagacatctcgatatgttctattgaagacaatggatgatggtattaaaataaacagggtagaggtaagtcaaacagagaggcattgattggctagacttatgctggtcatttaagtcctcttttggaaagtgatatgaggaaagaaactgaaggatggtagatcatgaaccagcatgctaactgggggagggaatcttgtaaataaaatactgagctagtgagaaagtagaatgatttatggctcataacttacacgaggatcccccataaggccctgtaggccactgtagaagcctttggttttgttttttttaaggcagagtttcactcttgttgccaaggctggagtgcaatggcgtgatctcggctcactgcaacctccgcctcctgggttcaagcgattctcctgccccagcctcccgagaatctaggattacagtcatagctgagattacaggaacaagacaccaggtaatccacccgtttgcattgagcttttgagtctttggaaataaaggtatcacggtctggcttgaggcttgaaatattcctcagggggatgggttaagaaacttcaggaggccaggaatggtggctcatgcctgtaatcccagcactttgggaggttgaggcaggtggatcacttgaggtcaggagtttgagaccagtctggctaacatggtgaaacctggtctctactaaaaatacaaaaattagctgggtatggtggtgcacgcctgtaatcccaactactcagctcaatcaggagaatcgcttgaaccttggaggctgaggttgcagtgagccaagatcgcaccactgcactccagcctgggtgacaaagcgagactctgtctgaaaaaagaaaaaaagtaccctgtgttctagtgttttttttctttactctacagcaaagctaagtagtaatgacgtgcagattctctttgcattaggattgcagattctagttggaaaataggttgcatccaagagatgcaactgacaaactttggggagagaagtgatgaagagctcgccattccatttgtggagactttgcattttctgggggtggtatcccacctatggttccctgggtttatgaggtggggcaggctcactgcttcctgattactggatcccagcagaagcagcatgctgctgaagtccaggtcactgggggccattgttatatatatttcacttctccaggccctctacctgactttagaagtgcccacccacatatattcagtttctggaggggtttgatcttaaaactggat[185 bp omitted]ggtggcgggcatctgtagtcccagctactcaggaggctgaggcaggagaatagcgagaacccgggaggaagaggttgcagtaagccgagatcgcgccactgcactccagcctgggcaactagaacgaggctccgtctcaaaaaaaaaaaaaaaaaaagaaaacatagaaattaaggatttccagatttccaaacactttaaaaatgaggccaggcatgatggctcatgcctgtaatcctagcacattgggaggccgaggtgggaggattccttgagcaccagaattcaaaaccagcccgggaaagatgacaagacctcatctctacagaaaacagttacctggccatggtaatacatgcctgtagagccagctactcaggaggctgaggtgggagaaccgatcaagcctggaagaccgaagccgcagtgagccgtaatcaccccactgcactccaggctgggggacagagcaagaccctgtctcaaaaaaagaaagaaagaagaaaaagaaaatcgcctaccgtaggtgttttaggttacagtttggattctctaatgcctgacagagaatccacaatccacgagctatctggttgatactcaagtccaggtttgtgaggctgcaggcttcttggagcgcctctgagagatatctacagccaagcttggttatgctgcattgctgtaacctacaggataatcaaaggaagagaagcctgttatccctctggctaacgccctgtgaagcagttatttccaacactatataccttccacttatatactggaatgcagtgctgcactcttggctcactgcaacctctgcctcccaggttcaagcgattcttctgcctcagcctcccaagtagctgggattataggtgcccgccacctatataaccagacttggtggtgcacgcctgtagtgccagctactcagaagactgaggcaggagaatcgcttgaatccgggaggcagaggctgcagtgagctgagatcgcgccactgcactccagcccgggcgacagagcgagactccgtctcaagaaaacaacaacaacaacaaaaagtatttatataaaacataggtggcaggtaggaattgacccatgaactggagctatatacttccaggtgggcttgcacataaaagcatgcaaatgggccgggcacagtggctcacgcctataatcacagcagtgggaggccaagacgggcagatcatttgaggtcaggagttcaagaccagcctggccaacatggtgaaaccccatctctactaaaaaatacaaaaatcgggccgggcgcggtggctcaaacctgtaatctcagcactttgggagaccaaggtgggtgaatcacaagatcaggagttcaagaccagcctggccaaagtggtgaaaccccatctttactaaatacaaaaattagctgggcacgatggctcacacctgtaatctcagcactttgggaggctgaggcagacagatcacctgaggtcgggagttcaagaccagcctaagcaatatggagaaacccgtctctactaaaaatacaaaattagccaggtgtggtggcacatgcctgtaatcccagctactcaggaggctgaggcaggagaatctcttgaactggggagacggaggttgtggtgagcagagattgcaccattgcactccagcctgggcaagagcgaaactccatctcaaaaaaaaaaaaaaattagccaggtgtggcggcccatgcctgtaatcctagctactcaggaggctgaggtaggagaattacttgaacccaggaagcggaggttgcagtgagccaagatcgcaccactgcactccagcctggtgacagagagagactgttaaaaaaaaaaaaaaaacatccaaatggccttctgattccatccatttccagctctgcctgggacaacagcttaggctctgggttcagaccgacccaggacaggatctgagccctgggtcacttattttctgcgtggttagattatggaaatttcactttccctgtcattttatttcatgtttaagttttgtctttaactgacacattctacatatataggggtatagtgtgatgttttggtgcaggtacacttcgtataacgatcaggtaggtgactgtttgtttaacaatagttattctaagccaggcacagtggctcatgcctggaacgccagcactttgggaggccgaggcaggcagatcacttaaggccaggagttcaagaccagcctggccaacatggtgaaacctcatctccactaaaagtgcaaaaattagccaggcatggtggagggcacctgtaatcccagctacttgggaggctgaggcaggagaatcgcttgaacctgggaggcagaagttgcagtcagccaagattacaccactgcattccagtctgggcgacagagtgagacttcatccaaaaaaaaaaaaatgaatctcagaaatgaccactagctagaatttctgaacaggaacaggtcttcaaccctatgcaatctcttgaatatttttctaaccataattttaatgtgaacaggtagctcacgctgggcttctttccatataacaagattcagccaactatagttcgtgggtcaattccaacctgccacctatgtcttttacaaataaggatttttgttgagtttttttttgtttttttcttgagacggagtctcactctgtcgcccgggctggagtgcagtggcgccatctcagctcactgcagcctctgcctcccagattcaagcgattctcctacctcagccttctgagtagctggtactataggcacgcaccaccaagcctggttaatttttgtattttttagtagcgatgggttttcaccatgttggccaggctggtctcgaaccttaggtgatctgcccaccattcaccacctgttccccaataacctatggaaataaaagtttaaaaaaaggtgccactggccctaccacataactcaatctacctccaatagcaggcagtactatgtcataggaatttgaaagaacacacacaaagcatcagatccgagaaccaactactcatctcaaatcttccttcatagcaggaagaggctctgctgacatgcaaatattaacatgtttctacctgtatctgcctggttttttttgtttctttgtttttttgagaaggagtcttgttctgtcgcccaggctggagtgcagtggtgcgatctcggctcactgcaacctccgccttccaggttcacgccattctcctgtctcatcctcccaagtagctgggactacaggcatccgccaccacacctggctaatttttggtatttttagtac[143 bp omitted]ttaaaagttacatttgaaatgaattaacaagtactttcatgtctctcctgcttgaattcatgtgcacacacacacacacccagcagggacttacaccaaggtctgcagtttacaatcagggtaactcaagccctcacacagaaacttcacccctgtatccccaatggggttcttggccaagcacaggtgtgtcagcttcttgctgacaaccaagacagcagcaaggtccttgcaactggcttctgtaagacgacagttttccaacctgcaaaaatatgaaacaaatggtagaaggatgagaacatttccacaactccaacctgctcagtgatgtccacatgctagggtactcagcttcagcccttcctgttcatcccctgccctctgtcctgtgggagtcatcatggccacaaaagagcaggaaggcgagaaggccaagatg[144 bp omitted]agcctcctgagtagctgggactacaggcgcccaccacacctggataattttttgtattttttagtagagacggggtttcaccatgttagccaggatggtctcgatctcttgacctcgtgatctccccgccttggcctcccaacgtgctgggattacaggcatgagccaccgcacccggcctgtttttggtatttttaatagaaacagggtttcaccatgttggccaggttggtctcgaactcctgaactcagatgatccgcccacctctctgctgagattacaggcaggagccaccgtgccgggcctgaagcaggtgtttatttcagcaagaggcgccacgtgggtggcgcagtaagtcaggtgttaccctttctcttctatagccccagaactaaaccagagctgcccatgggaagaggagacttacgacaacatctgcaggaagtgttttgggcgtgtcatggtcttgtacagcaacatggcaccctcatccaggagcacattggctgagagacgcaggtgcttcagggactggttggctttgaggacatagaagaattcagcccactgctccggggtggcacagtgacctcccaacctgtgaaaagagtgggaaaagtcattcttctgggaggacagagtataccctatcagctttttttttttgagacagagtttcactctgttgcccagtctggaatgcaaaggcgtgatctcacctcactgcagcctccgcctcccgggttcaagctattctcctgcctcagcctccgaagtagctgggattacaggcattcgccaatttttgtatttttagtagagacgggatttcaccatgttggccacactggtcttgaactcctgacctcaggtgatccacccaccttggcctaccgaagtactgggattacaggtgtgagccaccgcgcctggcccagatcagcttcttctgcttcacttcccaagacattatgtctttggtttatctcattctactcatgcctccaaccctggcctgaattactggagagatctaatgttgcctctgcttcttcaagtatccccatggccattagggtaacatccagccacttctccaagagattgtaatacaattctgtgcaatgtttcaccaaaacggcctgtgtggatgattttgcaggggggaaaaaaaaattttttttttgagacaggatctcgctctgttgcccaggctggagtgcagtggcatgatcacaggtcaccacaacctgtctcctgggctcaaatgatcctcccacctcagcatccactgtagctgggactagaaggggcaaattgatgcttaatactcaaaataaaaattttatcctggccaggcgcagtggttcatgcctgtaatcctagcactttgggaggccgagacaggcggatcacttgaggtcaggagttcgagaccagcctggccaacatggtgaaaccctgtctctattaaaaatacaaacatttgccaggcgtggtggtgcacgcctgtaaccccagctactcgggaagctgaggcagaactgcttgaacccaggaggcggaggttgcagtgaacgagatcgcgccactgcgctccagcctgggtgacaagaataaaactgtctcaaagaaaaaaaaaaaaaaaaaagattctcattgagtgcagagaaggttgcatgctccttatgaatacctaactcctgatgatctgagattgatgatccattctcctcaggctcccaaagtgcgaggatcatgcactccataggatcaggcaccaacgattagctcctgtgcctgatctgagatcgaacagtttcatcccaaaactacccccaaacccgtctgtggaaaaaactgtcttgtgcaaaaccggcccgcggtgcagaaaaggctgggggccactgctctcaatcccaacaattaggcaaggtgcagtcaggaatagcatgtccctaaagctggaacccagcacagaattcggggtgtttctttgcatggatagctggttatgcaacacagaagacaagctggtgggggaaagaggagaggccgactcccccacacaggcctgtttgaggaatacattccctgtctgggacggcatctggagtggttaccctttttcctagatcccccagcaacacggtgcagtggactccaggtgctggggagagccgtgaccgtgagacccacctcaggtactgcaggttgcatttatgatttctgagcaggtcacacagcatcagcatcatcgtgcgttcccactcgatgtgccctgccagggtcaggtgcgtgagggtcttcttcccaatgaaagcaagacagaagtcccggtacgcggtgtcaggggtgacgtttttaatcctagggaaaagcagaagagattccacttggagtgattaatactcacattgtgtggaggcatgtataaacaaaaagctgtttcacatttagaaattattagaagttcttggccgggtgcagtggctcgtgtctgtaaccccagcactttgggaggctgaggcaggaggataacctgaggtcaggagtctgagaccaacctgggcaacatggtgaaactccatctctacaaaaaataaattagctggggccgaggcaggcagatcgcctgaggtcaggagttcgagaccagcctggccaacatggggaagccccgtctctactaaaaatacaaaaattagctgcacatggaggggcatgcttgtagtcccaggtattcgggaggctgaggtaggagaatcacttgaatccaggaggcagaggttgcagtgagccgagaccgcaccactgcactccagcctg[174 bp omitted]aaaactagccgggcgtggtggcgggcgcctgtagtcccagctactcgggaggctgaggcaggagaatggcatgaacccgggaggcagggcttgcagtgagccgagattgctgcactgcactccagcctggggaacatagcgagactgtctcaaaaaaaaaaaaaaaagtcaagaagcagaggatcaggaaaaacaactaaggggtactaggcttaatacttgggtgacaaaataatctgtacaacaaactcctatgacacacggttacctgtgtaactaacctgtacttgtacctactttttggtttgttttggtaacaaaacaaaccaaaaaaaagatagctggggccaggcatggtggctcatgcctgtaatcccagcactttcgaagaccgaggcaggcgcatcaccttaggtcaggagttcgagacaagcctggccaagatggagaaaattccacctctactaaaaacacaagattaagtcattgcactccagcgcctaggtgacagagtgaaactctgtctcagaaaaaataaaaaataaaaaaggggccaggtgcagcggctcatgcctataatcccagcactttggaaggccgaggcaggcaaatcacctgaggtcaggagctcgagatcagcctgggcaacacggtgaaaacctgtctgtgctaaaagtacaaaattagccgggcaaggtggcacatgcctgtaatcccagctactcgggaggctgaggcaggagaattgcttgaacctgggaggtggaggatgcagtgagctgagatcgcgccattgcactccagcctgggcaacaagagtaaatctccgtctcaccaaaaaaaaaaaaaaaaaaaaagacagctggaaaatccccaaatacatggagatgaaacagcacatttccaaatttaaaaaacaaaagtacaagaagcttagtcatcgttcagggtcttccttgcaagatgagcttctacttactccactttctgcagatgacaggtgctacgggttacgtggtcacaaagaatccgcacagaagagtcactcaggaagctttgtttcacttccagaaacttgaggttgctgtttgagctgaagagagagcagaaatctgtccagaggcgaagagagcgaagatcctgccgagcccagttcggaatggttaggtaagtgcacctgcaggagaacacacgttcatctcttaggactagtacctgcatggtgagatgggcatctgcaaaccacatttcaatggcaaaaaccacaattacttttgcaccaacctaaaacagtgtctatagtaaacaatattgcatcacatgctttgctaccagtatagatcttaagttttacaaaaaaaataaaataatagataaggctgagtgaggtggctcatgcctgtaatcccaacactttgctaggccaaagtgggaagatcacttgagcccaggagtttaagaccaacttgggctagaaactgagacccccatctctacaaaaaaataaaataattaaccgggcaaggtggtgcacgcccatagtcccagctactcgggaggctgaggcaggagaatcacttgaacccgggaggcggaggttgcagtgagccaagatcgcgccactgcactccagcctgggggacagagcgagactccgtctcaaaaataaaaagccccaattcctaattgccaagtcgtgtctccacgttgaacatgaagctggaaagaagtccagccagagggaaattctgacagtaagcgacagggcaaaggagacgctggcctcttcctagtggagcgtgggatgggaaaacagttcttacctttcaaattcaatgtccagttcaaaatccatgtaattctccaggaacaccccctttgctacctgcagtgagagtttctgcaagtcttgacaatgcttcaggctgaaggaacaatgcatcacttcagaagtatttgtcaggtgaatagaaatttccttgaacggggccaccaccaccttcgccagctcctcctcctgagactcatacaggcagcccaagacctccttcaggtcggtcacggataagggcttatttgcatgaagatgtgctttgcattgcagcaattcctgtttgatgtccggtgacatccggcagccaaaagtggcctccaactccttggctctcttctcgttagcgaggccgaataagaagtgtcctacttgaatcaggtcggggttcttgagtctttcttctccggaaagcagcttctgtacgtccccgatgtcccaggcgtggccgtccctgtcctccccctcctccttctccagggcgtagaacagggcagtgagaaactgctggaagctgaggtggatgaaggagtagcagcctttggagactctgtcctggcggaggatgtctccgtccaggaacagacggaggtcggactcctgcaccccgagcctttccaggtcctctcggtggaacacggacatctgcgcccacaggccctgcgcggccaggaggctcagcgtccgcagcgcgccccgcagctgtgcgccctgcgggaaccggctgcagaggaaacgcaggaacagccccgtgcgggtgaggcaggtggggaccgggtcctcccccttctccatctgcagcttcagagtcgtgcacacaatccagcacaccgcgggggccgagcccagctggaacagggccgcgttgctcctcattagctcaaaggcacgcatggcttggtcctcgtctccaaagtgtctcaggaaataggccctcctgtcctcctccaggaagccctccacccttacgtagatcggctgctgcgccaggagctggaggtccctcagtgccctgggccgcgtggtgaccagcaaggctgccctgggtaacatcttcctcttcagcaaactccccaggaggacgggcaccggcttcttcttctcccagtccccgcagatgtcctggatcagcgccccaggtgggactttcagctcatcaaggccatcgaccacgaacaggattctctgtgcttgggctaggatgcttggaatgtcatcctgcaattcaggccagtctttggagatcagctctgcaaaactgcaggggcccatgcggctgagctccttgcagctgaggtagaacgcgtatctgagcgtcgggctgaggttgcagtctgtccagtccagcatacactttttggccagcgtggttttccccacgcctgcggggccgtgcagcaccaccgtgtaaggtgttagcttcctgggtgttctgggattcaagaatggaatgaaccgttggtttctcagagtgacgtcgtcatggaaattgtcaatgtctccttgccaaaaggtgttcttccagaccaaagactgtttctccattgaatttctccatccttccttttcacctgcagtgacagcccataggacagttgaggttgatgatgatgattttctgaattattttgtcaagtaccagaaatgagggccaggcacggtgtctcatgcttgtaatcccggcactttgggaggccaaggtgggtggatcacttgaggtcaggagttcaagaccagcctggccaagatagtgaaaccccatctctactaaaaatacaaaacattagctgggggtagtggcggccgcctgtaatcccggctactcaggaggctgaggcagagaattgcttgaacccgggaggcagaggttgcaatgagcagagacggagccactacactccagcctgggctacagagcaagattccgtctcaaaaaaaaaaaaaactaccagaaatgaataaaaccaggaagaagtgatgcaccttgcatgctctcaaacaccaaactcatgaccataggaccgtatttacccacctggctttgctaactccgagtcttcttctgcatctcccagctcaggattatctatttcttgcacctgtccgtcctctgtaaaatacttagatgtaagcctgacacagtaatttacacttcgtaaatcagacattattgtacataaagtgtcagccaggcatggtggctcatgcctgtaatcacagcactttggaaggctgaggtgggcggatcacaaggtcaggagatcaagaccagcctggccaacatggcaaaaccccatctctactaaaaatacaaaaaaaaaaaaattagccaggtgtggtgaaacacgcctgtaatcccagctactccggaggctgagataggagaatcacttgaacccagaggcggaggttgcagtgagcccagatctcgccactgcactccagccttacactccagcctgggcgacagaacgagactccatctcaaaaaaaaaaaaaaaaaaaaaaaaatgaccaggacaccccaggttctacttacccatcatctcagcctttgccatcttacacaattccgtgagattcatctcttccaagatgttcacagtcgcattccttatccaattttctgaggaggtgttgaccagaatttctgccagtttcttgccatcagcctcttccacctcagaccatggggtcttctgtagcacgtcttcgaggggaaaagcccataaaagggatttgaaactctttaattcatcctcgttcagctgctccagaagggtctgcagagtccactctagctggggcgatgtcatagtgctccgagtatgagaccttaggttaaggctgaagaactggggggaaaaaaggaaaaacagttcacgagttaccatcattaaatgaaaccacagtttcctgtgtgccaagaacaagactgttcctgctgtacagtgagtggtaaaatattccaaagactgaattaagagactgaaaatctggcccagcacggtggctcacgcctgcggccaggagtt[146 bp omitted]cccctgcctctactaaaaaaatacaaaaaattagcagggcgtggtggcgggcacctgtagtcccagctactcgggaggctgaggcaggaga[132 bp omitted]gtcagtggtatgctagggccagcccgtgctgcctaatgggggcttcctatatgtacctataccaacgtccatgggctgtgatttcacactgatagtacaa[140 bp omitted]acggcgaaaccccatctctactaaaaatacagaaattacaggcgggtgcctgtaatcccagctactcaggaggccgagacaggagaatcacacttgaacctgggaggtggaggttgcatgatctgagatcacgccattgcactcgagcctcggcaacaagaacaagactctgtctcaaacaaacaaaaaaacaaatcagcaaacactacaaaccaagacttcctcgccaccaaccctcagagccacttgtttaacatttcagcccaccactgaatgacacattgaaaacaaatagcaagaggacagatataaatataactgtactggccgggtatggtggctcaggcctggaatcccagcactttgggaggctgaggcaggtggatcgcctgatgtcaggagtttgagacccgcctggcccacatggtgaaaccccatctctactaaaaatacaaaagctagccaagtgtagtggtaggaacctgtaatcccaggtacgtgggaggctgaggcaggagaatcgcttgaacccaggaggcggaggttgcagtgagctgagatagcgccattgtactccagcctgggcaacaagagcgaaactctatctcaaaaaaaaaaaacttagccaggcctggtggaacatacccgtagtcccagatacttgggaggctgacacaggaggattgtttgagcctacgatttggaggttgcagtgagccagccactgcacgccag[224 bp omitted]gctgaggcaggagaa[131 bp omitted]agaaaaagtgacttgccaagcccgggtgctgatagaggtggacagctttacccttggagggaacagcaaatctttttccccagctgtgacgtgtggggaaaaggaggacagatcagactgttactgtgtctatgtagaaagaaatagacataagagactccattttgttctgtactaagaaaaattcttctgccttgagatgctgttaacctgtaaccctagccccaaccctgtgctcccagaaacatgtgctgtgtcacacgtgggtttagggctatgcaggatgtgctttgttaaacagatgcttgaaggcagcatgcttgttaaaagtcatcaccactctctaatctcaagcacccagggacacaatacactgcggaaggctgcagggacctctgcctagaaaagccaggtattgtccaaagtttctccccatgtgatagcctgagataaggcctcgtgggaagggaaagaccagaccgtaccccagcccgacacccgtaaagggtctgtgctgaagaggattagtataagaggaaggcctttttgcagttaagaggaaggtatctgtctcctgctcgtccctgggcaatggaatgtctcggtgtaaaacccgatggtatgttccatccaccgagataggggaaaaccgccttagggctggaggtgacacatgctggcagcaatactgctctttaatgcaccagatatgtttatgtatgagcacatcaaggcacagcacatttcctaaccttgtttatgacacagacatttgctcacatgttttcctgctgaccctctccccactgttaccctattgtcctgccacatccccgtctccgagatggtagagataatgaccaataaatactgaaggaactcagagacccggccggcgcgggtctcctgagcccacttttctttctgtgtactttgtctctgtgtctctttcttttctcagtctctcgtcccacctgacaagaaacacccacaggtgtggaggggcaggccaccccttcagtgaggtataattacatatatcctattttaggatggagcaggaagagcatgagagcccaggagttccagaccagcctgggcgacacaaggagaccttgtctctattttttaagtatttttaaagtaatatatacaacgtttacttgtcaaagtgtacagcatggagcgatgttatatatacagtgaaatgattaccacaatccagctaattaacatatccactgcttcatatagttgcctttcgtttttgcagtgacaacgcttgatgtacttagaaaaattcagggttttttggccaggcacggtggctcacgcctgtaatcccagcactatgggaggcc[136 bp omitted]c[131 bp omitted]cagggttttttttttctttttcagaaagtcttgctctgtcgcccaggctggagtgcaatggtgcgaggcttaccacaacctcctcttcccgggttcaagcgattctcctgcctcggcctcccaagtagctgggattacaggtatgccccaccacacctaattttttttgtatttttagtacaaacggggtttcaccatgttggccaggctggtcttgaactcctgacctcaggtgatctgcccacctcagcctcccaaagtgctgggattacaggtatgagccaccaggcctggccaagtattttttttcccaagtacatttttttctttttttcttttttttgagatggagtctccctctgttgcccaggctggagtgcagtggcacaatctcgactcactgcaacctccacctcccaggttcaagtgattctagtgcctcagcctctcaagaagctgggattacaggcgcaccgcatcacgccgggctagtttttgtattttta[145 bp omitted]gactacaggcgcccgccactatgcccagctaattttttttgtatttttagtagagatggggtttcaccgtgttagccaggatggtctcgatcttctgacctcgtgatccgcccgcctcggcctcccatagtgctgggattacaggcgtgagccaccgcgcccggccgag[136 bp omitted]atgcagcatttcactctggttgcccaggctggagtgcagtggcgcaatctcagctcaccgcaacctccgcctcccgggttcaagtgattctcctgcctcagcctcccgagtagctgggattacaggcatgtgccaccacgcccagctaattttgtatttttagtagagatggggt[132 bp omitted]ctggagtgcagtggctcaatcacacctcattgcagcccccacctcctggctcaggtgatcctcccacctcaccccacaagtagcttggacacagcacaaggtctggccttctttgttttttgagacggagtcgcactctgtctcccaggctggagtgcagtggcgcgatctcagctcattgcaacctccccctcctaggtttaagctattctcctgcctcaaccttccaagtaactgggattacaggcatgcaccaccacacctggctaatttttgtgtttttagtagagacagggtttcaccattttgggcaggctggtctcaaacttctggcctcaagtgatccacccgcctcggcctcccaaagtgttgggataacaggcatgaaccactgtgcctggccttatatttttttgtaatgacagagttttaccatgttgcccaggctagtctcaatctcctgaactcctctaaactatatttgaatagaagtccttaagacattaggccaggcgtggtggctcacacctggaatcccagcactttgggaggccgaggcagacagattacctaaagtcaggagttcaagaccagcctggccaacatggtgagaccccgtctctactaaaaatacaaaaattagctgggcatggtggcacgtgcctgtagtcccagctactcaggaggctgaggcaggagaatggcgggtgaacccaggaggcggagtttgcagcgaaccaagatcacgccactgcactccagcctgggcgacagagggagactccgtctcaaaaaaaaaaaaatcaaagatccttccagcatcctcgcaccaaccattaaggcttgggaagggctatggtggaaactcaaccaatagcttcttctcccttaaacgagaagacaaagaaatcgatgcaagaaccagcactcacctccctcaggtcaggtcttgcttccagcctgtgtttcctgcaaaggaaacggataaaaaggggaggtctctggcccttggtacgctaggtggagagacagctttcccgcccagggtggaaccgccccactgagattaacattgggtggctcccaaccactgacctcaggctcaccttgacatcacctgggccccatcctcagggatttggctgtaattgggcttcagtgggctttggagaattacggcttgctgaatctccccaggtgagattaatgtgcaattcccttcctagaccacccgggccaggtgtgataggcgacagaacaggaaatacacattttgggttttgcagggtacctggctcccagctttaaaaactcttgtagagaaaaaaaattaaacaaaaataaataaaaattaaaaaaaaagaggacaaaaactcccgtgacttcctaagttacaaatacaataagtctactttgtggccaactgtggtgcctcctgcctataaatcccagcaggctgagaggcctaggccagtggatccctaggggccaggagtttgataccagcctaggcaacatagcaagatgccatctcttcaaaaatatttaataattagccatgcataggctgggcgtggtagctcatgcctgtagtcccagcaatttgggaagccgaggcgggtggatcacctgaggtcaggagttggagaccagactggccaacgtggtgaaactctgtctctactaaacatacaaaaaattagccaggtgtggtggcaggtgcctgtaatcccagctactcgggaggctgagacaggacaatcacttgaactagggaggtggagggtgagtgaggcacgatcacgccattgcactccagcctgggtgacaagagcaagactgtctcaaaaacaaaaacaaaaaaattagccatacatgatgggctgcacctgtaatcccagctattcaggaggctgaggtgggaggatcacctgagctcaggagtttgaggctgcagtgagctgtgactggccatctcactccagcctaggccacagagtgagacccagtctcaaaaaaataaatagataactgatatttaatttttttttttggatggagtcttgctctgtggcccaggctggagtgcagtggtgcaatctccattcttgcaacctctgccttccaggttcaagcaattctgatgcctcagcttcccaagtagctgggactgcaggcacatgccaccatgcccaactaattttttgtatttttagtagagacagggtttcaccatattggtcaggctggtctcaaactcctgatgtcaggtgattacaggcatgagccaccgcacctggcctaaaattgtttttaaataaaacagtgtatgttgtggaaagcattcagcacagaattttggtagtttaaactgttaatttaatggaagcaaatggtcccacaaatgaagatgtatatatcagttgcagcatgccatctatagaaataggcactatggaggcctggcatggtggctcacacctgtaatccctgcactttggaaggctgaggcaggtggatcatctgaggtcagcagttcgagaccaacctgggcaacatggcaaaaaacccctggctactaaaaataaagaattagccaggcatggtggtgtgcacctgtaatcccagctactcaggaggctgaggcgtaagaattgattgaacctgggagttggaggttgccgtgagccgagattgcaccactgcgctccagcctgggcgacagagactccatctttaaaaaaaaaaaaaaaagatggccaggcgcagtggttcatgaatgtaatcccagcactttgggaggctgaggcgggaggactgcctgagtccaggagttcaagaccagcctgggcaatatggcgagactccctctctgaagaaaaagaaaataaaaacaataaaaataaattatattctagctgacaaaaagagagagagagtatattttgttaaaacatttggcctttagtcctagagcagctatggagagataaacatgaaagaggtatctcttgttatacatacccaggccctgcaaccacacctgagtttatgtaaatgaggtgacttttggaaagcccctagataaccccacaagtgcgagggactggctgccaaagaaaccgtcagtgattagacattgggaactttcagccccaggctccaagtggcctccagggaggggagaggggctgaaggttgaattgattatgaactgccagctatgtgatcagcattgcccacctaaggaatcctccataaaccccaaaagaaaagggtttgggccgggtgtcctgtggctcatgcccgtaatcccaacgctttgggaggcctagatgggaggattgcttgagcccaagaattctaggccagtctggacaaaatagcaagaccctggctctacaaaaaataaaaaattagccaggcgtggtggagtgcacctgtagacccagctactcaggaggctgaggcatgagaatcacttgaacgcaggagacagaggctgcagtgagctgagatagcgccactgcactccagcctgggtgacggagttagactgtctcaaaaaaaaaaaaaaccaggaaagagttcagaagagcttcctggttggtgaacccgggtgcattcgtgtgccaggactgtggtgcaccccaggtccacagggacagaagctcctgcacttcggactcctctaaacctccccctacgcatctcttccttggctgttcatttgtatcctttaaaatatgaaagggcgggttgcccctccacacctgtgggcatttctcgttaggtggaaggagagacttggaaaagaaagagacacagacaaagtatagagaaagaaataaggggacccaggggaccagcattcagcatatggaggatcccgccagcttctgagttcccttagtatttattgatcattttggggtgtttctcagagagggggatgtggcagggtcataggataatagtggagggaaggtcagcagataaacacgttaacaaaggtctctgcatcatagacaaggtaaagaactaagtgctgtgctttagatatgcatacacataaacatctcaatgccttacggagcagtattgctgcccgcatgtcccacctccagccctaaggcggttttcccctatctcagtatatggaatatacaatcggggtttacacccatacattccattgcccagggacgagcaggagacagatgccttcctcttgtctcaactgcaaagaggtgttccttcctcttttactaatccgcctcagcacagaccctttactggtgtcgggctgagggacggtcaggtctttcccttcccatgagaccatatttcaggctatcacatggggagaaaccctggacaatacctggctttcctaggcagaggtccctgcggccttccgcagtgtttgtgtccctgggtacttgagattagggagtggtgatgactcttaaggagcatgctgccttcaagcatttgtttaacaaagcacatcttgcacagcccttaatccatttaaccctgagtggacacagcacatgtttcagagagcacagggttgggggtaaggtcatagattaacagcatctcaaggcagaagaatttgtcttagtacagaacaaaatgaagtctcctgtgtctacttctttctacacagacacagttacaatctgatctctctttcttttccccacaaaaatatcctttgtagaccaggcacagtggctcaggcctgtaatcccagcactttgggaggctgaggcagatggatcacttaaggtcaggagtttgagaccagcccagccagcatggtgaaactgcgtctctacaaaaatacaaaaattagcggggcatggtagttcaacgcctgtaatcccagctactcgagaggctgaggcagaattgtttgaacccgggaggcagaggcagaggttgcagtgagccgaggtcgcacgactgcactccagcctgggtgcaacagagtgagactccatctcaaaaaacaaaaaacaaaaacaaaaacaaaacaaaaaatgaaaacccacttttagtaaaaaaaataaaaatgaaaaaatgtgaatcaggctgcactctggcccacatcctggctgctgtgtatcacgtggctctagacactgcacttttgcctcctcatcattgctgtagataggatttctgacagcagggtcattagacgaatttttttttttttttgagacggagtctcgctctgtcgcccaggctggagggcagtggcgcaatctctgctcactgcaagctccgcctcccgggttcacacaattctcctgcctcagcctcccgaatagctgggactacaggtgcctgcaacca[187 bp omitted]tctgggacattagaattataaggcttttgtttaaggatggtttcagatgtttttcagaccttgaattccagccaaatagctgacactaaccagtttgaagaccccagtgaggaatgggatcagcatgagaacactgcgtcttcatgcccctgtctccgccagcagtcagcatggccacactctggcccacaccaaaacacttaaaaaccctagccccggccgggtgcagaggctcacacctgtaactccagcactttgggaggccaaggcaggtgaatcacctgaggtcaagagttcaagaccagcctggccaacatagtgaaaccccgtttctactaaaaacacaaaaaattagtcgggcgtggtagcgggtgcctgtaaccccagctactcaggaggctgaggcaagagaattacttgaacctgggaggcggaggttgcagtgagcaaagatcctgccactgcactccagcctgggtgacaaagcaaaactccatctcaaaaaaaaaaaaaaccctagacccaaacttctgggggagatggattggaggtttcctcccatctcctcattcctcagccctgtgattaaacttccttctcttctgcaacacagtgacccggcaaattgactcacagcgtgcattgggcaacggacctactgtcagaggcgtgtaaccagggcaactccatcttgaataggagctgactaaaataaggctgagacctaccgggctgcattcc[132 bp omitted]ctctactgaaaatacaaaaattagtcaggcgtggtggctcgtgcctgtaatcccacctacttgcgaggctgaggcaggagaatcgcttgagccggggaggcggaggttgcagtaaaaagaaaaaaaaaagcattctaagtcacaggatgagataagtcagcacaagatacaggtcataaggaccttgctgataacacaggtagcaatgtagcaggaccagccacagacaaaactcctcagacaccgagttaaagaagaaaggggtttatccggccaggggcatcggcaagactcccgtctcaagagccgagatccccaagtgagcaattcctgtcccttttaagggctcacaactctaagggggtgtgcgtgagagggtcgtgatcgactgagcaagcagggggtacgtgactgggggctgcatgcactggtaatcagatccaaacaaaacaggatagggattttcacagtgcttttctatacaatgtctgtaatctatagataaccgattaggtcaggggtcaatctttaactaccaggcccagggtgtggcgccgggctgtctgcttgtggatttcattcctgggccgcggggctgtctgcttgtggatttcattcctggggcgcggggctgtctgcttgtggatttcatttctgccttttagtttttactttttctttctttggaggtggaaattgggcataagacaatatgaggggtggtctcctcccttagcaataaagaatccagccaggccgggcgcggtggctcacacctgtaatcccagcactttcgggggctgaggcgggtggatcacacggtcaggagattgagaccatcctggctaacacggtgaaaccatctctactaaaaaa[142 bp omitted]tgacagagcgagactccgtctcaaaaaaataaaaaataaataaaaataaataaagcatccagtcaaactccatcaaaaccaagatagtgacgagagtaacctctggttgtcctcaccgctccactcccagcagccccatgacagtttacaaatgccatggcaatgtcaggaagttaccctatgctgtctaaaaaggggaggcatgaataatccaccccttgtttag[147 bp omitted]ctactaaaaaaaaatacaactaattagctgggtgcggtggcgggcgcctgtagtcccagctactcgggaggctgaggcaggagaatggcctgaacccaggaggcggagcttgcagtgagccgagatagtgccactgcactctggcctggtgaaagagcgagactccgtctcaaaaaaaaaaaaaaaaaaaaaaaagggcaaccgaggccggacgtggtggcttacgcctgtaatcccaacactttgggaggccgaggcgggcatatcacctgagctcaggaggtcaagatcagcctggccaacatggtgaaaccccatctcttactaaaaatacaaaaattagccagacgtgatggcaggcacctgtaatcccagctactcaggaggctgaggcaggagaatcacttgaactgaagtgattcaaggcagaggtttcagtgagccaagatcacgccactgcactccagcctgggcgacaagagcaaaactccatctcaaaaaaaataagggcaactagcagccctatgggctgctgtctatggagtagctattcttttactccttcactttcctaataagcttgcttccactttactccatagtctcgccctgaattctttctggtatgagattcaagaacccaccatgcccagctcgtccttacttgcttttaaaaaatatcattggtggccgggcgcggtggctcacgcctgcaatcccagcactttgggaggccaaggctggcggatcacctgaggtccgaagtttgagaccagcctgaccaacatggagaaaccccgtctctactaaaatacaaaaaaattagctgggtgtggtggtgcgtgcctgtaatcccagctactcaggaggctgaggcaggagaatcacttgaacccgggtggcagaggttgcagtgagccaagatcatgccattgcactccagcctgggcaacaagagtgaaactccgtctcaaaaataaataaataaaatcattggaataattttcttctttaggaagagcagccttgggccaggcatggtggcacatgcctggaatccccgaactttgggcagcccaggtaggtggattgcttgagttcaagagttccagaccagcctggacaacatgatgaaacctcttcttgatcaaatatacagaatttcgactgagcacagtggctgtaagcccagcatgttgggaagctgaggtgggtgaatcatttgaggtcagaccagcctgactaacatggcgaaaccccatctctacaaaaaatacaaaagttagccaggaggtcgtgggcgcctgtggtcccagctactcgggaggctgaggcaggagaatgacgtgaatcccggagtcgtaggttgcagtgagccaagatcgtgccactgcacttcagcctgggcgacacagcaagactgaggttgcagtgagctgtgatcctcaacctcctgggttcaagggattgtcgagcctcagcctcccaagtagctgggattatagacattcgctcccatgcctggctaatttttgtattgcaaaaatgcactccagcctagatgacaggactgcactccagcctggatgacagagcaagactgtgtctcaaaaataaataaataaataaataaatagccaactgtgatcgtgcatgcctgtagtcccagctactcaggaggccaaggcaggaggatcacttgagactgggaggtcatggctacagtgagccatgatctcgcaactgcactccagcctgggcaacagagggagagaaaggaaggaaggagggaaggagggaaggagggaagggaaggagggaaaggaagtcagtcttgtgggacaaggaaggaaggaaggaagtcagtcagtcttgtgggactcagccctgaacctttgggatctgatgctgtccccaggtagggagtgtcagaactaaatcaaaggagaggacacccagctggtctctgctggagaactggttgttggtggggagaaacatacatttttggtgaagtattctgtgttgagtgtgaaagtaggaaaaacaggactgggtatggtggttcatgcctgtcattccaggattttgggaggccaaggcaggcggatcacttgaggtcaggactttgagaccaccctggtgaacatggcaaaaccccatctctactaaaaaaaaatacaaaaattagctgggcgcggtggcaggtgcctgtaataccagctactcgggaggctgaggcaggagaatcacttgaacccgggaggcggaggttgcagtgagctgagattgtgcctttgcactccagcctgggagacagagcaagactctccctcaaaaaaaaaaaaaggccgggcgcagtggctcacgcctataatatcagcactttgggaggccgaggcaggtggatcactgacacccaacaccacgccttctaattttttgcatttttagtagaaacggggtttcaccatgttggccaggcttgtctcgaactcctgtcctctggtgatccacctgccttggcctcccaaagtgctggaattacaggcgtgaacccagcaacttttcccccttttatcataccttaatttgcctccaccacccccagaagctccaagtctctacgccttttcatttatgtatgtatgtatttatttatttatttatttattttattttgagacagggtctccctctatctcccaggctgcagtgcagtggcgtgatcttggcccactgcaacctccacctcccgggttcaagtaatcctcctgtctcagcctcccaagtagctgggattacagggcacaccaccacacctggctaatttttgtatttttagtggagactgggtttcaccctgttgtccaggctagtctcaaactcccgacgtcaggtgatccacccatttcggttcccaaagtgttgagattacagaccgtgagccactgggacggacacccctactcctttcttcttcttcttctttttttttttttttttgagatggagtctccctttgaagcccaggctggagtacaatggtgcgatcttagctcactgcagtttcctcctcccgggttcaagtgattctcctgcctcagcctccggagtagctgggattacaggcacacaccaccacaccagctaatttttgtatttttagcagagatggggtttcaccatgttggccaggctggtctcaaactcctgacctcaggtgatccacccaccttggcctcccaaactgctgggatcacaggcgtgagccactgcaccctacactcttatactcctttctgtagctcaggcagctagatgagcttcaatcatctggcccttcctccagtctcacatttttgtgggactcctgtgcatacataattgaatctggtttttcttctgtcaaactgttttgtgtcaatgtaattcatagcccatccaaagaacctaggagggtggagggaatccattttctctcctccacactggagggccatggagcccaagagttcaagactggcccggtgtacaaagtgagacccagtctctatttaaaaaagatggggagggggccgggcacggtgtctcacgcctgtaattccagcactttgggaggcccaggtgggtggatcacctgaggtcaggagtccgagactagcctggccaaggtggtgagaccgtgtctttactaaaaatacaaaattagcttggtatggtggcaggagcctgtaatcccagctacttggaaggctagggcaggagaatcgcttggtttgggattttctccctgaggcacttgctatctccaggattatgggtctcaggtgaaagaaagacaaagaaggagagagagacagagagggacagggaaagagaatttcagacttatctaacattgacacttaggagaagtagggagaaagaggtgggaaaataaagtggctaggtaaaaatgaacatgtcagtaacaataatagcattaacaataactagtattgccgggtgcagtggctcacgcctctaatcccagcactttgggacgccgaggtgggcgaatcacaaggtcaggagttcaagaccagcctggccaacatggtgaaaccctgtctctactaaaaatacaaaaagttagctagctgggcatagtggtgcatgcctgtaatcccagctactctggaggctgaggcaggagaatcgcttgaacccgggaggcaaaggttgcagtgagtcaagatcaggccactgcactccagcccaagggacagagtgagactctgtctcaaataataataataataataactagtggccaggcacagtggctcacgcctgtaatcccagtgtagcaggacgagccacagacaaaaacctctcagacaccgagttgtagaaggaagggctttattcagctgggagcatcggcaagctactgtcttaaaatccaagctcctcgagtgcacagtttctgtcccttttaagggctcacaacactaaagactgcgcatgaaagggtcatgattgagcaatctaggggatacataacaggggtttcgtgcactgctggtcagagagaaagaatagggcagggagtttcacagtgttcttctatacaatgcctggaatctatggataacatcgggttctaagtcatgagttgatttttatctactaggtttacgccaggcaggcccaggcctggtttcgggtctggttttgggtctggtgcctggcgccgggctacctgcctttggtttcacttccttgtttttttctttttctttttttttttttttgagacagagtcttgctctgtcgctaaggctggagtgcagtggcacaatctcggctcactgcaagctccgcctcctggattcaagcaattctgctgcctcatccttccgagtagctgggattacaggcgcacgccaccatgcccggctaatttttgtatttttaatagagacggggtttcacc[139 bp omitted]tataaaacaatatgagacggtttctctcttccctcaccagcactttgggaggctgaggcaggtggatcacaaggtcagagtggatagcactttaggaggttgaggtgggaggatcccttgagcccaggagctcaagtccagcctgggcaacatagcaagacccccatttccaattttagtgtatgtgctgccaaagcaaatactctgagaccctgtttctacaaaaaataaaaaaattaaaattagtgcttggaaaaaaaaattagtgcttgaccaggaggcaagcacacctcctcatcctctcatggatgtctgtctgtagaaagtaaatggagacagcttcattttacccaactgctccgttttaggtccgctcctgagcttctgttgttcccagccatgcaaccctgggagccgactcccggctgcagagccttgtcagaagcaggcaatgtacacagagacccaaggcctggtgtagacaggctttcacagacctgggcattttgttgaattgtttttgaattgtggtttcttatcagttcatccgatactctgttctaaccacgtagttcctcttttggatctccaaacccctttgcaggttccatctacccgaaccaaactcacttattccaacagaagtctggtgtttcttgttttttttgtttgtttgtttctttcgttttgttttttgagatgttgtctccctctatcacccaggctggagtgcagtggcgagatctcagctcactgcaacctctgcttcccgggttcaagcaattctcctccctcagcctcctgggtagctgggattacaggtgcctgccgccacacccagctaacttttgtatttttagtagagacgggatttcaccatgttggccaggctagtctcgagctcctgacctcaagtgatccacccatctcagcctcccaaagtgctgggattacagccttaagccaccgcgctcaaccagaagtctgtttaaatccatccttctccccagccacccatgagttatgtgaccttggggttgctacttaacatttcagtctcaatttcctcaatagaacaaaagttagaagaattgtaacaaaagatagttttatttttatttttatttttattttttgagatggagtcttgctctgtcacctaggctggagtgcagtggtgtgatggtggctcactgcaagctccgcctcccggattcacgccattctcctgcctcagcctcccaagtagctgggactacaggcacccgccac[185 bp omitted]aaaatattctatataattccaaggtcaaagaagaaataacaaagggcatttttaaaaatgctagaactgagtggtggtgaaattgctgttgaaatgtgtttgttgcactgatggaaatttataaatgtaaatatttatattaaaatataaaataatgggccaggcatagtggctcacacctgtaatctcagtactttgggaggccaaggcgggagggccatggagcccaggagttcaagaccggcccggtgtacaaagtgagacccagtctctagttaaaaaagagggggagtgggccaggcacagtgtctcacgcctgtaattccagcactttgggaggccaaagcaggtggatcacccgaggtcaggagtccaagaccagcccggccaaggtggtgaaaccccgtgtctactaaaaatacaaaattagcttggtatggtggcgggagcctataatcccagctagggcaggagaatcacttgaacccgggaggcagaggttgcagtgagccaagatcatgccactgcactccagcctgggcaacaacagagagacttcatctctaaataaataaataaataaataaaagaaaatacaaattttttaaaaaaggtactgtggctgggcgtggtggttcacacctgtaatcccagcactttgggaagccgaggcaggtggatctcagatcaggagttcaagaagagcctggccagcatggtgaaaacctatctgtactaaaaattagcctggcatggtggcaggtgcctgtaggaggctgaggcaagagaattgcttgagccccggaggcagaggttgcagtgagccgagaccacaccactgcactccagcctgggcaacagagcgagagtctgtctcaaaaaggaaacaaaaaaaaaagtacctccaaattatggtagggtgtccatattaagaaggtagaaaaaggtcgggggaagtggatgcctgtaatcccagaactttgggaggctgaggcgggtggatcacctgaggtcaggagttcaagaacagcctggccaaaagggtatggtgaaaccccatctctactagaactacaaaattagccgggcgtggtggtacatgcctgtaatcccagctacacaggagtctgaggcaggagaatcacaggaaaccggcaggcagaggttgcagtgagctgagatcgcgccattgcactccagcctgggcgacaagagcaaaactccatctcaaaaaaaaaaaaaagaaaaaatgaaaaagaatttattgaaatgtgcagtctgaaaactgctcctgcacattttcattcatccttcctattccctccatccctcaattttttttttttttttgagacagagtttcgctcttgttgcccaggctggagtgcaatggcacgatctcagctcactgcaacctctgcctcccaggttccagccattttcctgcctcagcctccagaatagctggaattacaggcatctgccactacgcctggctaattttttgtgtatttttagtaga[144 bp omitted]tttgtttgtttgtttttgagacagagtcttgctctgtcacccaggctggagtgcagtggcgcgatctcagctcactgcaagctccgcctcccgggttcacgccattctcctgcctc[217 bp omitted]gagcgcggcagtgaagagctgggcttccggaagctgacagctgtttgtgatcttcaagacctcagacaggttttctaaatatgccttgccttcattttctcaaggaaagtgaaaaatgggtaggatcatggcaatcactactgtgtagcaatgtttagaggacttaataagtaaacacagggtcaagcatggtggctcacaccggaaatcccagcactttgggaggccgtggtgggaagattgcttaagcccatggggttgagaccagcctgggcaacatagtgagacctccatctctataaaaaatacaaaaatctagtcaggcgtgatggcgtatgcctgtagccttcagtaagctatgattgtgccactgcacaccagcctaggcgacagagtgagaccctgtctcaaaaagaaaaaacgaaaagaaatatagatgtacatatacatatgttggttctaaaacatgaaaaaggctgggcgcggtggttcgtgcctgcaacccaagcactttgggaggccgaggcgggcggatcacgaggtcaagagtttgagaccagcctggccaacatagtgaaaccccatctctactaaaaatacaaaaaaaaggctaggcgcagtggctcatgcctgtaatcctagcactttgggaggccgaggtgagcagattacctgaggttgggagttcaagaccaccctgtccaacatggtgaaaccccatctctactaaaaataagaaaattagccgggtacagtggcacgcgcctgtaatcccagctattcaggaggctgaggcaggagaatcgcttgaactctggaggcggaggttgcagtgagccaagattgcgccactgcactccagcccgggcgacagtgccagactcagtctcagaaaaaaaaaaagcaaaacaaacaaagaaacatgaaaaaaagctataaaacccaacttttttctttttttttttgagacggagtctcactctgtcgcccagggtggagtgcagtggtgcggtctcggctcactgcaacctccgcctcctgggttcaagcaattctctgcttcagcctcccaagtagctgggattacaggcacccgccaccacgcccgactaattttttgtatttttagttgagacggggtttcatcatcttggccaggctggtcttgaagtcctgacctcgtgatccacccgccttggcctcccaaagtgctggaattacaggcgtgagccaccgcgcccggccaaaacccaactttttagtc[433 bp omitted]tggccagcatggcaaaaccccgtctctattgaaaaaaatacaaaaattaaccaggcgttgtggcgcatgcttgtaatctcagctactcgggaggctgaggcaggggaatcacttgaagccggcaggcggaggctgcggggagccgagatcgtgccgttgcactccagcctggggaacagagcaagactccattaaaaataaaataataataatactgtgaatgtgaaactgatgaacttggtgcttttcatgcgtctcatagttgacgtgtcattgatatttcacttgaaatacggttggatttttattaataatatacctggggtgatgggagaaggtagccaatcacagctgaggcttctaagcggtgattctcagcctcggccgcaatcacaattatctgggactctcgaaagaactccagggtctgggcagtcccagtgtaaccaatcaagcagaatctctaggcgttcgtgctttgaaatgaggctccacataggtaagtttaacaggcagtcaagatggaggaccacaggtggagatcgggaagctcaggtgaaggaccgccccccaacaccccccgcccccaaaagacctctcagtaattccggtggatacaggaagtgctcagcaacgattacgccccgagggccaatcacagggctgcggccgagaaagaagccttaatagagctttctcaacctgcagccctcatctccgccggcgagtagggccaggtgttgggaggtgagtagctctccggcagctctgcaacttcatttctttatttctccattcc[144 bp omitted]gcctcccgagtagctgggactacaggcgcccgccaccacgcccggctaattttttgtatttttagtaggtggctcacgcctgtaatcccagcactttaggaggctgaggctggcagatcacctgaggtcgggagtttgagaccagcctggccagcatggcaaaaccccgtctctattgaaaaaaatacaaaaattaaccaggcgttgtggcgcatgcttgtaatctcagctactcgggaggctgaggcaggggaatcacttgaagccggcaggcggaggctgcggggagccgagatcgtgccgttgcactccagcctggggaacagagcaagactccattaaaaataaaataataataatactgtgaatgtgaaactgatgaacttggtgcttttcatgcgtctcatagttgacgtgtcattgatatttcacttgaaatacggttggatttttattaataatatacctggggtgatgggagaaggtagccaatcacagctgaggcttctaagcggtgattctcagcctcggccgcaatcacagttatctgggactctcgaaagaactccagggtctgggcagtcccagtgtaaccaatcaagcagaatctctaggcgttcgtgctttgaaatgaggctccacataggtaagtttaacaggcagtcaagatggaggaccacaggtggagatccggaagctcaggtgaaggaccgccccccaacaccccccgcccccaaaagacctctcagtaattccggtggatacaggaagtgctcagcaacgattacgccccgagggccaatcacagggctgcggccgagagagaagccttattagagctttctcaacctgcagccctcatctccgccggcgagtagggccaggtgttgggaggtgagtagctctccggcagctctgcaacttcatttctttatttctccattcc[131 bp omitted]ttctcctgcctc[136 bp omitted]tacaggcgtgagccaccgcgcccagccttttttttttttttttttttttttttcttctcttttttgagggtcttactctgtttcccaggctggagcgctgtggcaggatctcggctcactgaacccttgacctctcaggttcaagcagtcctcacgcctcagcctttgaagtagctgggaccgtgggagggtgccaccacatctgttctggctaataatattattattaccactgtttgcagagactcactagatgtagggtcttaatatgttgccgaagctggtctctaactcctgggctcaagcgatcttcctgcctcagactcccaaaattctgggattataggcaggtgccaccgcgcccggcctaaatcttttcttctgttagaaattaagtggttctgcctgtctcagtggctcacgcctgtaatcgcagcgctttgggaggccgaggcgggaggatcacctgaggtcgggagttcgagaccagcctgaccaacatgtagaaaccccatctctactaaaaatataaaattaggtgggcgtggtagcgcatacttgtaatcctagctactcaggaggctgaggcaggagaatcacttgaacccgggaagcggaggttgcggggagcctagatcataccattgctctccagcctgcgcagcaagagagaaactgtctcaaaaaataaaataaaataaaattcagtggttctgactggggaaagagtagcagatgcttagatctagagagactctagttaaggttggctcataagaggatagttgtgtgtgcttttatttctgttctcttgggggatttaggatagagctatagagagctccaaaaaaaaaaatatattggaacaggtcagatgctgtggttgctgtgtgtggagtcctgggcagtgctaaggttttgtgtctaatgagtcctcttaacaagaaggtattgttttttattcactgaggtgagggagcctcttagcatcattctagtccagcttccggacctgagtcttatgcaaatacctatgccagttgccattctcacgctattcacagctatcatataaagaggtgttataccctttctgtaaagtttttgttgctactgctatttttttttttttttttttgagacaaagtctagctctgtttcccaggctggagtacagtggcgctatctcagctcactgcaacttccacctcccaggttcaagcaattctcgtgcctcagccttctaagtagctgggactacagccgcctgtcaccaacctggctaattttcgtatttttagtcgatatagggtttcactatgttggccaggctggtctcaagctccagacctcaggtgatcctcccaccttggactcccaaagtgctgtgattacaggcgtgagccaccgcacccggccctgttgtttttaaaatagagacagggtcttaagttgccaggctggtctggaacttctggactggagtgatcacccacctgagcttcccaaagtgcggggattgcaagcgtcagccaccacccccagtgttgtgtttttgtttgttttaccaggctggagtgcagtggtgcgatcacagctcactgcagccttaacttccctggctcaggtgatcctcccacctcagcctcctcagtagctgggactacaggtgcatgccactatgcccagcacaattttttttttttttgtatttttttgtagagacagggttttgccatgttgcccaggctggtctcaaactccaagcaatcctcccaccttggcttcccaaagtgtttggggttccaggtgtgagccatggccccccggccagcttcagtaaagtaaaagccacacacctgtgtcctgagaccaggctccaccactaagttatctttaagccttttttttttttgagacagtttcactcttgtcgccccaggctggagtgcagtggcgccatgtcagctcaccacaacctctgcctcccactcccaggttcaagcgattctcctgcctc[168 bp omitted]caccgcgcccggctgtgtgtttgcattatcatattcagcccagttttcacgaagtttcttgtctcctgggtgatccacgtagctccccacttccttatctgatctatgcttgtcctttcattgttgtgttactactttgctataatgagagagtgttttcgctttataggttaacttttagaacctgagcagcccctcagggaaaaccctgacagtagctggttattttgcaattagaaaaactagctgggcactgaggcaggtgaatcacgaggtcaggagttcgagaccagcctggccaacttggtgaaaccccccatctctactaaaaatacaaaaaaattagctgggcacagtggtgaatgcctgtaatcccagctacttgggaggctgaggcaggagaattgcttgaatccgggaggcagaggttgtagtgagccgagattgcagcactgcactccagccagggtgacaaagtgagactccgtctcaaaaaaaaaaaaaaaaaaaatacaaaaagtagctgagcgtggtggtgggtgcccataatcccagctagtcgggaggctgaggcaggagaactgtttgaacctgggaggcagaggttgcagtgagctgagatcgtactactgtactccagcctgggctgcagagtgaaactatctcaaaaataagtaaataaaagtaaaatgagttgaggtcttgctctgttgcccagatgggagtgcagtggcacaatcaaggctcactgcagtttcagtctcccaggctcaagcaatcctcccactgcagcctcctgagtagctgggactacaggcatgtaccaccacccactgctaacttatttttcatggagatgggggtctcactatgttgcccaggctgggagtttgttcttgaagaagcagggtagatggtgagtgtccttgttcgtggcacagcaggaactggcatttgagacaggagtgctaatcaccatccctctccactcctcccttgattgtcatcacagctcccacgtgggacaagatggtgtcttcggcgcagatgggcttcaacctgcaggctctcctggagcagctcagccaggatgagttgagcaagttcaagtatctgatcacgaccttctccctggcacacgagctccagaagatcccccacaaggaggtagacaaggctgatgggaagcaactggtagaaatcctcaccacccattgtgacagctactgggtggagatggcgagcctccaggtctttgaaaagatgcaccgaatggatctgtctgagagagcaaaggatgaagtcagaggtgagtggaaatcggtccacactgtgtcctaggaggaagcaggcgtcctctccaggactttagaaattcagaaggccaggcgcgctggctcacgcctgtcgtcccagccctttgggaggctgaggcggttggaccacctgagggtcaggagtttgagaccagcctgaccaacatggtgatgaaacagcatctctactaaaaatacaaaaatttgctggacgtggtggcagacacctgtaatcccagctactccgggaggctgaggcaggagaatcacttaaatctaggaggcgggggttgctatgagccgagatcacgccattgcaccccagcctgggcaacaagagcaaaattctgtctcaaaaaaaaaaagaaatggcattgaggcttggagagggactgcttgttctgaatgcaggtgctggatcttcataaaccctggtgtctgtcctggtccttattttctacctacttctttttttttttttttttgtccttttatttttttattttttattttattattattattttttttattatactttaagttttagggtacatgtgcacattgtgcaggttagttacatatgtatacatgtgccatgctggtgcgctgcacccactaactcgtcatctagcattaggtatatctcccaatgctatccctcccccctccccccaccccaccacagtccccagagtgtgatgttccccttcctgtgtccatgtgatctcattgttcaattcccacctatgagtgagaatatgcggtgtttggttttttgttcttgtgatagtttactgagaatgatggtttccaatttcatccatgtccctacaaaggacatgaactcatcattttttatggctgcattgtattccatggtatatatgtgccacattttcttaatccagtctatcattgttggacatttgggttggttccaagtctttgctattgtgaataatgctgcaataaacatacgtgtgcatgtgtctttatagcagcatgatttatagtcatttgggtatatacccagtaatgggatggctgggtcaaatggtatttctagttctagatccctgaggaatccccacaccgacttccacaatggttgaactagtttacagtcccaccaacagtgtgaaagtgttcctatttctccacatcctctccagcacctgttgtttcctgactttttaatgatcgccattctaactggtgtgagatgatatctcatagtggttttgatttgcatttctctgatggccagtgatgatgagcattttttcatgtgttttttggctgcataaatgtcttcttttgagaagtgtctgttcatgtcgttcgcccactttttgatggggttgtttgtttttttcttgtaaattattttctacctatttctatcgctttcaggtatcgtacagttggcctaacatatctgtggatttaaccaatcctagatcaaaaataatgggggcaaagacaattaaaaataacaatacaataaaatgcacatgaactatggttatttaactcttcttgagagaggatctcactctgtcacccaggctggaattt[132 bp omitted]gtattctaaatagagatggggtttcaccatgttagccaggatagtctcgatgtcgtgacctcatgatctgcccgcctcggcctcccaaagtgttgggattacaggcgtgagccaccgcacccagccagcaagtgcatttagaactactctactttctaccccataacttttttttttgtttgtttgagacaagtctcactctgtcacccaggatggagtgcagcagcacaatctcagcttattgcaactcccgccccctgggttcaagtgtttctcctgcatcagcctcttgaatagctaggattatacaggcacctgccactgtgcctggctaaattttgtattttaatagagatggggtttcactatgttggccaggctggtcttgaactcctgaccacgtgatcaacccgcctcagcctcccaatgtgctggaattacaggtgtgagccgccatgcccagctacacttttttttgaaacggggtctcgttttcttgctcaggctggagtacaatggggcaatcacagctcactgcagccttgacctcccagacttgagcaatcctaccactatggcctcccaccacacctcgctcattcttgtatatatatatatttttgtagagatagggtttcaccatgttgcccaggctggtctcgaacttctgtgggctcaaccgatcctcctgccttggcttcccacagtcctgggatcagaaacatgagccacagtgcctggccagtgcagctttatttacagtaaccaagatatagagtcagtctaagtgaccatcagtggatgaataaaaaatgtgcccgttgggtaccctgcctactgcctgggttatgagattgttgggaccccaagccttaaaaaggaaacatggtaggccgggcacagtggctcacgcctgtaatcacagcactttgggaggccaaggcgggtggatcacttgaggccaggagtttgagaccagtcaggccaatgtggtgaaaccctgtctctactaaaaatataaaaaaatcagccgggcgtggtggcacactcctgtagtcccagctacttgggaggctgaggcaggaggattgcttgaaccagagagtcagaggttgcagtgagccaagatcgtgccactgcgctccagcctgggtgacagcaagactccatctcaaaaaaaaaaaacaaacaaacatggtattaattacacaatggaatactcctcaaccttaaggaactcctatctttttatttaaaaattgccagttttatttcagctagagatcactttttagcataatgtttcctgtctttaacaatgggtgagggtttttttttttttttttttggtttggtttggattttggttttgcttttgagtcgaagtttcactcttgtctcccaggctagagtgcaatggcgcgatctcggctcactgtgacctcctcctcccaggtttaagtgattctcctgcctcagcctccagagtagctgggattacaggcgcctaccaccatgcccgctaatttttgtattttagtagagacagggttttaccatgttgaccagactggtctcgaactcccgacctcaggtgatctgcccacctcagcctcccagagtgctgggattacaggtgtgagcaaccatgcccggccaagggtttttaactttagctgacctccggaggttacaagtttgaaaacggcaggaggaaacccagagagttgtaaacttacgaaggtctgggctctgaaaaagatacaaattttctttccatgccaatagcgctcacacagacatggtgaatgttcctgaaacccgccggactttctgtaagaagtgtggcaagcaccacccccacaaagtgacacaaggcaaggattcttggtatgcccaggggaagtagtgttatgacaggaagcagagtggctatggtgggcagactaagccgattttccggaaaaaggctaaaactacaaagaagattgtgctaaggcttgagtgccttgagcccaactgcagatctaagaatgctggctattaaaagatacaagcagccaagcgcggtggctcacgcctgtaatcccaacactttgggaggccgaggtgggcggatcacaaggtcaggagtctgagaccagcctggccaaaatggtgaaaccccatctctactaaaaatacaaaacttagctgggcatggtggtgtatgcctatagtcccagctactcaggaagctgaggcaggagaatcgcttgaacctgggaggcagaggttgcagtgagccaagattgtgccactccagcctgggcaacagagtgacactctgtctcaaaaaaaaaagatgcaagcattttgaactggaaggagataagagaaaggaacaagtgatccagttctaagtgtcatcttttcttttatgaaggcaataaaatcttgagcttatggtaaaatgcaaaattttccccccttctcctttttcagaagcagctttgaaatcctttaataaaaggaagcctctatcattaggtaagttacctcatttataacttttattcttcatgtgagatctggggactcgggcctttgttttaaggagaatgtgctgagcactaagaatgcaaagaaatgccggacttagcatccctgctcccagggcggagctggtctcgcaggtgcgtagcagtaagacctgggaagctgaaacacgatcgcgtttgttggaaatctataaatacatacaaagcggggaagggtaagcttggcctttgaatctggataaggtagagacttttcttttttgagatggaggcttgctctgtcacctaggctgaagtgcagtggtacgacctcggctgactgcaacctctacctcctgggttcaagcagttctcctgcctcagcctctagaatagctgggattacaggtacctgccaccaggcccggctaattttttgtggtgtttgtagagatggggtttcaccatgatggccaggctggtcttgaactcctgacctcaagtgatctgcccacctcagcgtcccaaaatgctgggattatgggcatgagccaccaccacacccggttttgtttttttttttttttttttttttttttttttttttttgaaacagggcttcactctgtcacttaggctggagtggtgcaatcatggttcactgcagccttgacctcccaagctctggtgatcctcctgcctcagcctcctgagtagctgggaccacaggcacttgccaccatgcctggctaatttttttcactttttgtagagacagggtcttgctatgttgcccaggctggcctcgaattactaaactcaatcagtcctcctgcctcaccctcccaaactgctggggtacaggtgtgagccatgacacctggcccttaccagctacttatatcctgaagattattattattttttttttttttgagatagagtctctctctgttgcccaggctggagtgcagtggcgtgatctcggctcactgcaagctccgcctcccgggttcatgccattctcctgcctcagcctcccgagtagctgggactacaggcgcccaccaccacgcctggctaatttttttgtgtttttagtagagacggg[148 bp omitted]cggcttgattgcagtggcacagtcatagctcattgcagcctcaaccttccaggctccagagatcctcttacctcagcctcctgagtagctgggactacaggtgtgcactgccacacctgactaatatttgtatttttggtagggacagtttcactatgttgccagatatggtgtcaaactcctggtctcaagtgatcctcccaccttggcctcccaaagtgctgggattacagacatgattcaccacacctggccatgaagactttttttttttggacaaagtctcactctgttgcccaggatggaatgcagtggcatgatctcagctcactgcaacctctgacctccgcctcccggttcaagtgattctcttgcctcagcctcccgagtagctgggattataggtgtctgccaccaagcccagctaatttttgtaattttagtagagatggggtttcaccatgttggccaggctggtcttgaactcctgacctcgtgatccacgtgcctcagcctcccaaagtgttgggattacaggtgtgagtcactgcgcctggtctcatgaagaccttttttgagacagagtcttgctctgtcacccaggctggagtgcagtggtacaatctcactgcagcctccgcctcccaggttcaagtgattctcctgccttagcctcccaagtagctgggattacaggcgcctaccaccacgtctggctaatttttgtatttttagtagagacagggtttcaccatgttggccaggctggtctcaaactgctgacctcaaatgaactgtctgcctcagcctcacaaagtactgggattacaggcatgagccacctcacctggtggtgaagactctaaaggctcttctcagatcagcctttgtcctgaatttcacatgcccgtgtccagttccctccccagcatcttttcaggagttccatggactcacctcttcattatccagggttaagctgcagatattgttattaggattccaccttgttctctctctttttttttttttttttgatacggagtctcgcttgctcttttgccaggctgaagtgcagtggagcgatcttggctcactgcaatctccgcctcctgggttcaagcaattcccttgcctcagcctcgcaagtagctgggacttacaggtaacacaccaccatgcccggctaattttttgttttagtagagacggggcttcaccatgttggccgggatggtctcgatctcctgacctcatgatccgcctgccttggcctcccaaagtgttgggttacaggcatgagccaccatgcccggctgattccaccttgttcttacattctttcccagttcattttaaatttatctacctcatcagaaactagggggttaggcctggcaggcagatcacctgaggttgggagttcgagaccagcctgaccaacgtagagaaaccctgtctgtactaaaaatacaaaattagccaggtatggtggcacattcctgtaatcccagctactccggaggccgaggcaggagaatcacttgaacccaggaggcggaggttgcagtgagccgacatcacaccattgcattccagcctgggcaacaagagcaaaactacatctcaaaaaaaaagaaaaactaggcagttaatcctcaaagcctttccagtggccttatgcgtgagtagtttgtgtgtgtgtgtgtgtgtgtgtgtgtgtgtgtgtgtctttcacaccatgtgttctgaactacttaggaattctcaccagaaaggcacataaacctgggatcatggcctaatgtactttcacttttacatccagtaccttatcaacgtcctttttagtacctaatctaggcttcactactgagactcaggggtccaacttgagccatcttggagtcccactgccagcacagcaacaggcctgtaatgccgccctttttctccagggataacacggaaagaacgaccacctctagacgtggacgaaatgctggagcgcttcaaaacagaagcacaaggtgggtgtcaggacctccaatgttggagtcagctgaggaagccccccgttcttgctgctatctcctgttcctttgaagaaccccatctctctccaatcttttcctccactattcttaatgtgcccactgtctcctggagaatgccaacctcccttccgtaagaatagagggaagaacgaacgttgcagagaattagaactcagtttgtagaaagttaggagcacagcgcagagagtttttgtttttgtttttgttttgagacagtttctctgttggccaggttggaatgcaatggcgcgatctcggctcactgtaacctccacctcccaggttcaagcgattctcctgattctcctgactcagcctcctgagtagctgggattataggcacctgccaccacacccagctaatttttttttttttttttgagacgaagtcttgttcttgtcacccaggctggagtatagtggcaccatccctgttcactgcaacctccgcctcccagattcaagtgattgtcctgtctcagcctcctgagtagctgggactacaggtgcatgccaccacgcccagctaatttttttttgtacttttagtagagacaggtttcaccatctcattcagggtggtctcaaactcctgacctcaagagatctgctccacccacccccaagtctcccgaagtgctgggattacaggcgagagccaccgtacccggccttctttaaattatttaaaagttgacaggtggccaggtgtggtggctctcacctataatctcccagcactttgggaggctgaggcgggtggatcaagagatcgagaccatcctggccaacatggtgaaacccaactctactaaaaacacaaaaattagccgggtgtggtggcacccgcctgtagtcccagctactcaggaggctgaggcaggagaatcgcttgaacccgggaggtggaggttgcagtgagccaagattgtgccactgcactccagcctggcaacagtgcgagactccatcttaaaaaaaaaaaaaaaaaattgacaggcataaatgtatttatggtacattgctcagacaactttaatataaacaacttacagagaaaattgagtcttttgggtaggtgacttgcctgagctgactttgtgataggttttttctgttttttttgtttttgaaatagagtctcactctgtcatgcaggctggagtgcagtggccccatcttggctcactgcaatctctgcctcctgggttcaaggggtcttcctgccacagcctccccaggtgctgggactataggtgcccaccactatgcctggctaacttttgtgtttttagtacagatggggtttcaacagggtagccaggttggtctagaactcctgacctcaagtgatccacctacctcggtctcctaaagtgctgggattacagctgtgaaccaccgcacctagcctgtgatcagtttcagatcagccttgcttactccacattccctcttatcttcctggtagcatttttgttttttcttgagaaagagttttgcccttgtcgcccaggctagagtgcaatggtgtgatctcggctcgccacaacctccacctcccaggttcaagtgattctgcctcagcctcccgagtagctgggatcataggcgcccaccaccacatctggctaatttttgcatttgttagttttatttttagtagacagggtttcaccatgttgggcaggctggtcttgaactcctgacctcaggtgatccacccacttcggcctcccaaagtgctgggattacaggcatgagccaccgtacctagcccacattgacttttgatacagcaagtatttcttgctatggctctgtataatagaggtgagtaacttggttgaaggaattgtttgccctgttcatctctctagacacggccaatgtcattcctggcacacaatctttttttttcttgagatggagtctcactctgttgcccagactggagtgcagtggtgcaatcttggcccactgcaacctctgctacccaggttcaagcgattctcctgcctcagcctcccaaatagctgggagtacaggtgtgtgccaccacgcccagctaattttttgtattttagtagagacagggtttcaccgtgttagtcaggatggtctggatctcctaacctcgtgatccgtccgcctcagcctcccaaagtgctgggatgacaggcgtgagccactgtgcccagcctagcacacaatcttgacaaagaatttcggtgcgacttggggtactgtggtgcctgctctatcatcatgcttcagcaggaaatgtgggtgaatagtgcctggtggcatggcaggtaaagaaatgttttgttttgtttttttttttgagacagtcttgctctgtcacccaagctggagtgcagtggcgcaatctcggctcactgcaagctccatctcccgggttcacgccattctgcctcagcctccccagtagctgggactacaggcgcccgccacacgcccggctaattttttgtatttgtagtagagacagggtttcacc[140 bp omitted]gcagatttattggagaaagtaggaaaagacattggcagagagaccccagcgggcaggttgtcatgagtagctcactgccaggagaccaaagcttcctgcagattttatagaatagggcttgggctgattgataatgtcaacagggggtttaacttgcggtcttctttcagcagaagtgtttgataaactgaggcgtttcatggcaaacagggagtttgtgagctctgtgtgtgatctggccaggaaggccaaacatcttgggccgtatctcctggaccataaaagcagacctggcccagtgcagtggttcatgcctgcaatcccagcactttgggaggctgaggtgggtggatcatctgaggtcagcagttttagactggcctggccaacatggcgaaaccccatctctactaaaaatacaaaaattagcctagacgcagtggcacatgcctgtaattccagttacttgggaagctgaggcaggagaatcgcttgaacccgggaggcggaggttgcagtgagctgagattgcgccactgcactccagcctgggcaacagagtgagactgtctcaaacagacctatagctgacctgtttcctcttgtttgtatgccctgaaccatggaggaaagcttatttatttattttattgagatggagtcttgctctgttgcccagggtggagtgcagtagtgcgatctcttactacaacctccatctcccaggttcaagcaattctcgagcctcttggcctcccaagtagctgagattacaggcatgcgccaccacgcctggctaatttttgcatttttagtagagatggggtttctgtgttggccaggctggtctcgaactcctgagctcaagtgatccaccccacctcagcctcccaaagttctgggattataggcatgagccaccacacctggccggaaaacacatttgtagcttatttgctttatctgatcccgtgccccccctcccccccgccccatcagcctgcctccttttctctaattgggactccacaggaaatacacctgattttgtgtcaatctcacatgagtttgtattttgtagcgtttacagaaacgaaaggaaatgtcatctgcctgggtaaagaagtctttaaaggaaaaaagccaggtctgtaccatatcttcctgcagggagcttgggatcagatttctctttataaacttgaagtcctcttaactttcctatgtaacacaaagcatttatttatgtatgtatgtatcgagacggagttttgctcttgttgcccaggctggagtgccgtggcgtgatctcgactcactgcaacctccgcctcccaggttcaagcaattctcctgcctcagcctcccgagtagctgggattacaggcatgcgccaccatgactggctaattttttatttttagtagagacaaggtttcttcatgttggtcaggctggtgttgaactcccaatgtcaggtgatctgcctgcctcgacctcccaaagggctgggattacaggcatgagccactgtgcccggccaacacaaggcattttgttattttggttttccctatgggtaactgattgcatcctctctcccttccctcctcaccaatgataaagacaaagacaataggtgcaggtatatattgaagacgaagttccgggagatgtggaagagctggcctggagatagcaaagaggtccaggttatggctgagagatacaagatgctgatcccattcagcaaccccagggtgcttcccgggcccttctcatacacggtggtgctgtatggtcctgcaggccttgggaaaaccacgctggcccagaaactaatgctagactgggcagaggacaacctcatccacaaattcaaatatgcgttctacctcagctgcagggagctcagccgcctgggcccgtgcagttttgcagagctggtcttcagggactggcctgaattgcaggatgacattccacacatcctagcccaagcacggaaaatcttgttcgtgattgacggctttgatgagctgggagccgcacctggggcgctgatcgaggacatctgcggggactgggagaagaagaagccggtgcccgtcctcctggggagtttgctgaacagggtgatgttacccaaggccgccctgctggtcaccacgcggcccagggccctgagggacctccggatcctggcggaggagccgatctacataagggtggagggcttcctggaggaggacaggagggcctatttcctgagacactttggagacgaggaccaagccatgcgtgcctttgagctaatgaggagcaacgcggccctgttccagctgggctcggcccccgcggtgtgctggatcgtgtgcacgactctgaagctgcagatggagaagggggaggacccggtccccacctgcctcacccgcacggggctgttcctgcgtttcctctgcagccggttcccgcagggcgcacagctgcggggcgcgctgcggacgctgagcctcctggccgcgcagggcctgtgggcgcagacgtccgtgcttcaccgagaggatctggaaaggctcggggtgcaggagtccgacctccgtctgttcctggacggagacatcctccgccaggacagagtctccaaaggctgctactccttcatccacctcagcttccagcagtttctcactgccctgttctacaccctggagaaggaggaggaagaggatagggacggccacacctgggacattggggacgtacagaagctgctttccggagtagaaagactcaggaaccccgacctgatccaagcaggctactactcctttggcctcgctaacgagaagagagccaaggagttggaggccacttttggctgccggatgtcaccggacatcaaacaggaattgctgcgatgcgacataagttgtaagggtggacattcaacggtgacagacctgcaggagctcctcggctgtctgtacgagtctcaggaggaggagctggtgaaggaggtgatggctcagttcaaagaaatatccctgcacttaaatgcagtagacgttgtgccatcttcattctgcgtcaagcactgtcgaaacctgcagaaaatgtcactgcaggtaataaaggagaatctcccggagaatgtcactgcgtctgaatcagacgccgaggttgagaggtgagaaccgtttcactctaccagtcgttccatctttagcctcatcccatgcccccttaggaagaggccagagcctcctatgcactgtggcttagggtcaggaattccctcttgttggactctttgtttgtttttgttttgagatggagtcttgctctgtcgctcaggctggagcgcagtggcgcgatcttggctccctgcaacctccgcctcccgggttcaagtgattcttctgcctcagcctcctgagtagctgggactacaggcgcctgccaccttgcccggctaatttttatattttcattagagacgggatctcagcatgttggccagtctggtcttgaactccgcctgacctcaggtgatccacctgcctcagcctccaaagtgggattacaggcatgattcaccatgcccggcccaaatatatttttttaagacagggtcttgctgtgttgctcaggctggagtacagtggtgaaatcagctcactgcatcctcaaacttctgggttcaagtgatgttcctgagtacctgggatgacaggtattaagtgtgcaccatcatgtccagctaacttaagtgggggtttttttttgtgtttttttttttttttttttttttggaaagacaaaatctcactatgttgtccaggctggtcttgaactcccaaagcactgagattacaggcatgagttaccacacgccctgcctgaatatttcttattgatatgtatagatatgtatattcccaatctttttttttttttttgagacggagtttcactctttttcccaggtcggagtgaagtggctcgatctcggctcactgcaacctccgccccaccaggttcaatgattctcctgcctcagcctcatgagtagctgggattacagccacccacgaccatgcccagctaatttttgtacttttagtagagacggggtttcaccatgttggccaggcaggtctcgaactcccgacctcaggtgatccacccgcctcagcctcacaaagtgctaggattataggcgtgagtcaccgtgcccggtctatattctctatcttttatcaatgatgtgcttagcattttaacttatttttaccctctattggatttttgtctaagaagaataggttctttctcctgtgatgcttcttgggtgttgagttgtctgatggtggtgctaataagtgattacatggtccagctttcaattgtactcatttgtcaggggtatatgcccagagaaaccctaaatacttcagccgtgatggacacacatttggtgtaaccctttcttctcttccctatagatcccaggatgatcagcacatgcttcctttctggacggacctttgttccatatttggatcaaataaggatctgatgggtctagcaatcaatgatagctttctcagtgcctccctagtaaggatcctgtgtgaacaaatagcctctgacacctgtcatctccagagagtggtgtaagtagaaactaattcatgaactcaaatccttagggtatgaaaatggtacaatgttaacatcggagcaatattcagattcctgtactagactcttaagtgctcgagacacagggaattgagagagtcctgtccttaaatttattttgtgggataatcgtataaagtaatttctaggggctgggcatggtggttcacacttgtaattccaacacttcgggaggccgaggcagacagatcacttgaggtcaggagttcgagaccagcctggccaacgtgacaaaaccctgcctctactaaaaatacaaaaattatccaggcgtggtggcaggcacctgtaatatcagctacttgggaggctgaggcaggagaattacttgaacccaggaggcggaggttgcagtgaaccaagatcctgccactggactccagtctgagtgacagagcgagactgcgtctcaaaaaaaaaaaaaaaaaaaaagaaaaagaaaaaaagggccgggcacaatggctcacgcctgtagtcccagcactttgggggcccaaggtggggggatcacttgaggtcaggagttcaagaccagcctggccaagatggtgcaagaccctgtctctacgaaaaatacaaaaatttgccaggtgtcgtggcaggtgcctataatcccagctactccggatgctgagggtaggagtcgcttgaatccgggaggcagagtttgctttgcagtgagccgagatcgcgccactgcactccagcctgggcaacagagtgagactccatctcaaagaaaaaaaaaatctgtaaagatggacaaaaatttaaacatggaaaaaatagttcctaaagtttaaatatatcgagcccctggtttccatttaagtacgatacaggtgtacacactaaagatttcactttcgttctcttttccctaggttcaaaaacatttccccagctgatgctcatcggaacctctgcctagctcttcgaggtcacaagactgtaacgtatctgacccttcaaggcaatgaccaggatgatatgtttcccgcattgtgtgaggtcttgagacatccagaatgtaacctgcgatatctcgggtatatctcttaatcattaaaatccttcatcatacaaacataagctaccacaagcttatgtggcaattttgtgtaaataagaaaaagttcgttattctgactagaaacagtactaagggcagatgacccaggatgcagcatgggctgaacttgagtttctacttgccttgaacagtaaacaccctggacaaccatacgtgaggaccctgaatccaaagaaactcccagaatctttatcatctttttttttttttttatgaagtcttgctctgttgcccaggccaaagtgcaatggcacgatcttggctcactgcaacctctgtctcctgggttcaagtaattctgctgcctcagcctcccaagttgctgggattacaggcacccgccaccacgcccggctaatttttgtgcatttagtggagctggtttcgccacattgccaggctggtctcgaactcatgacctcaggtgacctgccctcctcaggctcccaaagtgctgggattataggcatgagccaccatgcccagccagagtccttatgttttggttttggttttggttttttctttttcttttttctttttgagatggagtctcgctctgtcacccaggctggagtgcgttggtatgatctcaggtcactgcagcctccacctcccaggttcaagtgattctcctgcctcagcctcctgagtagctgggattacaggtgcacaccaccacacctggttaatttttgtattattagtagagatggagttttaccacattggccaggctggtctcgaactcatgacctcaggtgatctacccccccacccccaccccaccccgccgtcggcctcccaaagtgaggcatgagccaccgtgcccagcccagaatctttatcttctatcagagatcattcactcatggttcatgcttctcctgtatgatgattcagaataccagctattgacatttttcaagcaagaacccttcaggaacatcaagttgccccttttctgttagtcctctggtttgagagctctccccttgggaagctgtccagtggctgcccaggcgatgagaacctacatgcatcatggggttccatgaagcctcacttggccacactggtgtagtaggtggtcattggcctcaaattattgccctgggccaggcgcagtggctcacgcctgggaggccgaggtgggtggatcacttgaggtcaggagttcaagaccggcctggtcaacatggtgaaactctgtctctactaataatacaaaaattagctgggcatgttggcgcacgcctgtagtcccagctactcaggaggctgaggcaggagcatcatttgaacctgagaggcggaggttgcagtgagctgagatcacaccaccgcactccagtctgggcaacagtgtgagactgtctcaaaaaaaaaaaaaaaaatcttggctgggtgcggtagctcatgcctgtaatcccagcactttgggaggccaaggcaggtggatcacaaggtcaggagttcaagaccagcctggccaacatggtgaaaccccacgtctactaaaaatacaaaaacattagctgggcatggtggcgcgtgcctgtaatcccagctactcatggaggctgatgcaagagaattgcttgaacctaggaggcagaggtagcagtgagccaagatcacgccattgcactccagcctgggcaacagagcaaaactccatctcgaggacagaaaaaaaattgattgctctggctctactgatacaatcttaggctgcttaatgggatcttagttgaataggatgctgtacatcttacaggtattggaaggttgaatgaaaccaagcccatgcattcaatagtggctgctatcattactaaccgttgcaattaccctcttttctttttgcctgagaataatgggatgcagggtgagggggaatattgggtgaattaaagatttgggtcactaatttctttctttttttctcaagatatagtcttgctctgtctcctaggctggagtgcagtgccacaatcttggttcactgcaacctctgcctcccgggttcaagtgattcttctccgtcaacctcccaagtagctgggattacaggcacccacctgtatttttgtatttctagtattttgtatttctagtagagacagggttacgccatgctggtggccagggtggtctcaaactcctgacctcgggcaatccaccacacccagctaatttttggtatatttagtagagccggggtttcaccgtgttggctgggctggtctcgaactcctgacctcaagtgacatccatcttccaaaatgctgggattacagccatgtgccaccacgcccagctaattcttgtatttttaggagaaatggggtttcatcatgttgttccggctggtcttaaactcctggcctcatgatccacctgccttggcctgccaaagtcctgggattacaggcatgagccactgtgcccagccactcatttcttatgaatttattctaacacattttccggatgaacagggcaccttgaaacataggttagtgggctgggtatggtggctcctgcctgtaatcccagtactttgggaggcctaggctggtgtatcgcttgaagtcaggagttttttgttttgagacggagtcttgctctgtcgcccaggctagagtgcagtggagtgatctcggcttactgcaacctccgcctcctgggttcaagtgattctcttgcctcagcctcctgagtagctgggactacaggcacgtgtcgccacgcccatctaacttttgtatgtttagtagagccggggttt[132 bp omitted]catggtaaaaccccatctctactaaaaaatacaaaaattagccaggcaagatggcatttgcctgtaatcccagctactcaggaggctgaggcgggagaatctcttgaatctgggaggcagaggttgctgtgagctgagatcgcgccactacactccagccagggcgacagagcataaataactccctttcaaaaaaccaaacaatgaaacataggttagcggagtctgcatccaacattagagtcagattgactaagttctgtatttccagctgattcctgggcgatgttggtgccactggtctgaccaccctttgacaactgctgctccagataattcaagtcggggtataacacaaccagtgagatgtaaaccaaagacgattccacggttagattctcaagaatgacttgttctgccgggcgcggtggctcacgcctgtcatcccagcactctgggaggccgaggtgggcagatcacctgagattgggagtttgagaccagcctgaccaacatggagagacccccacctctactgaaaatacaaaattagctgggcatgttggtgcatggtgcatgcctgcagtcccagctactcgggaggctgaggcaggagaatcacttgaacccaggaggcggaggttgctgtgagccgagattgcgccacctgggcaacaagagtgagactcagtctcaaaaaaaaaaaaaaaatgacgtggtcctatttctcccacaggttggtgtcttgttccgctaccactcagcagtgggctgatctctccttggcccttgaagtcaaccagtccctgacgtgcgtaaacctctccgacaatgagcttctggatgagggtgctaagttgctgtacacaactttgagacaccccaagtgctttctgcagaggttgtcgtaagtctctcctctcttacagagcagctgtgctttcgatctggggccacagacgagcaatggtcatgcctgacttggctgtatggaacctctcgctgatgtgaacacctgttcccatgtttagatccaggccgatggcctgtgaattttgttcttctctcattcctattccttcataggatcaccagtgcatgatagaaggtggggagttcacaagaaggggcttttggatgctggcacttgtggagctagccgggaaggttgaagttggacctgtcaaccgtgttgccatttgtgattcttttgtaggttggaaaactgtcaccttacagaagccaattgcaaggaccttgctgctgtgttggttgtcagccgggagctgacacacctgtgcttggccaagaaccccattgggaatacaggggtgaagtttctgtgtgagggcttgaggtaccccgagtgtaaactgcagaccttggtgtaagtccgtgctggctgcctgtgtgcgtgggtgtatatgcacacgccccccacctccgggtttgagtagggtggttatgagaacacttaattcctctaaaagttccaagcatgatgctaatgacaactggtaagacctgggtagatgatggtaggaaaaaagtataagtagtagtagagtagtagtaatattctatagggatttggggaatgtagctggttttcgggttttttttttcctctttatgtatgtatgtattttagagatgggatctcgccgtgttgcctaggctggtctcaaactcctgagctcaagagatctgcctgccttggcctcccaaagtgctagaattacaggcatgagccatgtcaccccatgctgtgttttctcttaatctgtgttcttagaactataactgtaacataaattgcatgcaattggttgtaaatggaattcatttacttattttttaatgaatgatttgcaaatcaggtagtcttctgggccagtgtacgctcagactcccaatggaagctattggaagctacatgctcaatgtgatcctccttttaatactaaaatcacaggacacgtggcctggcatagtggctcacgcctataatcccatcaccttgggaggccgaagcaaggcagatcccttgagggcaggagttcaagaccagcctgcccaacatggtgaaacattgtctctctactaaaaatacaaaaattagtcacgcatggtgggacatgcctgtaatcccagttactcaggaggctaaggcaggagaatcacttgaacttcggaggtggaggttgcagtgagctgagatggcaccactgaagtccagtctggccaatagagcaagactctctcaaaaaaaaaaaattataggacaaatctttagaaaggaattggggcctggcatggtggctcatgcctgtaatctcagcactttaggaggcgggcagaacacctgaggtcaggagtttgagaccagcctggctgatgcagtgaaaccctgtctctactaaaaatacaaaaattagctaggcgtggtggtatggtcctgtaatcccagctacttgggaggctgaggcaggagaatcgcttgaagtcgggaggttgcagtgagccgagatcgtgccagcctgggtgacagaacgagattgtctcaaaaaaaaaaaaaaattgtatctgcactgatggtttctgttcagagattcgattttatgttaacatctctggtattttttttttttttttttaagatggagttttactcttgcccacgctggcaatggcatgatctaggctcactgcaacctccggcttcaaggaggttgattctcctgcctcagcctcctgagtagctgggattacaggcactcaccaccacgccgggctaatttttatatttttagtagagatgggatttcaccatgttggccaggttggtctcgaactgacctcatgatccgcccgcctcagccttccaaagtgctaggatttacaggcatgagccactgcgtccagccatacatatctctggtattctttgtctctaacatcacctccaacagttaggaactgtcctcttcctatgaagtaactaatctaggatatgtacctggcatctgaaaactacccacttaaatttaatgacatattcagttcatggctggagacgatgagtagaaggaaaggattcttcccacacccactatatctaggccctgaaacattaaaaaagaagtcccacaagcagtgagatgtcaccgactcactaactgtatcttcaaatgaatgtctagtttttttggttgtgtgtgtgtgtggtgtgtggtgtgtgtggtatttttttgggggggggggggttttcttttttttttttttttggttttttttttttgatagtcttgctctgtcgcccaggctggaatgcagtggctccatctcagctcactgcaacctccacctcctgagttcaggtgtgattctcctgcctcagcctcccagggattaaggtgcatgccaccacgcccagctaacttctttatttttagtagagacgagttttcaccatgttggtcaagctggtctcgaattcctgacctcaggtgatccacccacctcagcctcccaaagtgctgggattacaggtgtgagccaccgtgccggccccctcaattcaactttttgatccatgcccctattttgctaagttgtcaacttccctttagtcttatgtgggttttcctccattacagtcatggaagtttctagaaggccgggtagggtctttgagaggccgaggcaggtggatcatgaggtcaggagttcaagaccagcctggccaacatggtgaaaccctgtctttactaaaaatacaaaaattagccaggcgtggtgtcggagcctgtaatcccagcttacttgggagggtgaggcagagaattgcttgaacctgggaggcggaagttgcagtgagctgagattgtgccactgtactccagcctgggtgtcagagcgagactgtctcaaaaaaaaaaaaaaaaaagtttctatacattcataaagtttcaagatttgggggtgtgttttcacttctccatcgtcatggactccaatctgccatctatttccaaggcccttccaggtcctgtgtccctcagctagtggtatgcttcacttgggacccagagatacatgggcattatagttcaaattataattaagtttagaactctattgagacagaagaaagaaaacagagctaaggtgaaatatctctgataatctgtgttggttaatatctaggatcctagtaccagatatgttggagtgtgagctggtgtcttctgcctgtaagacactacctctctagcaactgaatttagcaaatacaatcgtaatcccagcatgttagggaggccagggtgggcagatcatctgaggtcgggagttcaagaccagcctggccaacatggggaaaccctgtctctactaaaaatacaaaacttagctgggtgtggtggcacgcgcatgtgtgtacacacacacacccccctgtaatcccagctactcggaaggctggggcacaagaatcgcgtgaaaccaggaggcggaggttgaagtgagccaccgtgccagctgagaatcctttttacttctccaacttctgttggccacctgcattccttggcttgtggcccttcctccaacttcggcagagcatcttcaaacgttgccctggctcccttatcacgtcacctcctgctggctttgactctcagctccctcttatgaggatccctgtgattgctggacctacccaaataaaccaggatataaaccatcttaagatgctcagtcacctctacgaggtcccttttgctcgcaggtgccaggagttgggacttggacatctttaggggaggccattcttctgtccaccacaccaccccatgattccatttccatgtcaccactgtctctaagtgtgtctaacccacggctcaagagtcaaaggtgcatcacagcagtgagaactcacaggttcgggtttgctttcttcctgtggttgatttctaggctttggaactgcgacataactagcgatggctgctgcgatctcacaaagcttctccaagaaaaatcaagcctgttgtgtttggatctggggctgaatcacataggagttaagggaatgaagttcctgtgtgaggctttgaggaaaccactgtgcaacttgagatgtctgtggtgagttaacttataagttcaacttcctatacttacaccttactgaatctgtggctagtgtaaaataatcagtgaagccgacttcccaagttatataattgagaggacctttatagagtcgatcgagcatttactaggatggttaaaggaataagttctagtctatgtctaagtttttgtttttttttttcttgaagttttgctcttgtcacataggctggagtgcagtggcgtgatcttggctcactgcaacctccgcctcccaggttcaagcaattctcttgcttcagcttcccgagtagctgggattacaggcgcccgccaccatgcccagctaattcttgtatttttagtagagacagggtttc[140 bp omitted]tgtgaaattttaaggatacagtgcctcaagccattcagccaaaagccactgcccagcaccccacattcagagaggtgggaattgggccaggcacagtggctcatacctgtaatcccagcacttcgggaggccgaagcgggcggatcacttaaggtcaggagctcaagaccagcctggccaacttgaaactccatctctactaaaatataaaaattagccgagcatagtagtgggtgcctcttttttttttttttttttttttgagatagtttcactcttgttgcccaggctgtagtgtaatggcgcgatctcagctcactgcaacctccacctcctgggttcaagtgattctcctgccttagcctcccacatagctgcaaataaacaggcatgtgccaccatgcctggctaattttgtatttttagtatagacggggtttctccatgttggtcaggctggtctcgacctccggacctcaggtgagagccaccgtgcccagccagtaggtgcctttaatcccagctacttgggaggctgaggcaggagaatcacttgaaccctggaggcagaggttgcagtgagctgagatcctgtcactacactccatcctgggctacaagagcaagactccatctcaggaaaaaataaaaaagaggtaggaattagatatcgtgccagaaaatgctggctctatcagcaggtgagtggtctcaacttggctatcttacaaataccttgtgagttagctacaatcagatgcacttgaacctggaatcctatctgggaggcaatcttaaaagaatttgactcgggatgggcaaggtggctcatgcctgtaatcctggcattttgggagtccaaggcaggtagattgcttgaggccaagaatttaaaaacagcctggccaacacaatgaagccctgtctctactgaaagtacaaaaatccgctgagcatggctgtgtacctctgctcccagttactcaggaggctgaggtgggaggatcacttgagcctgggaggaagaagttacagcgaattgagatcacgtcacctcactccagcctgggtgacagtgagatcctgtctcaaaaaaaaaaaaaaaacaaaaaaaacaaaggcgcctttttaatcactcactgacacgtgtagaggagcaaaaagtttgagttgctggttggcccaggaggtcaaggctgcagtgagccaagatggcgttaccacactccagcctgggcaaccgagtgagaccgtgtttcaaaaaataaagtggcagggtgcagtggctcatgcctgtaattccagcactttgggaggccgaggcaggtggatcacctaaggtcaggagttcgtagaccagcctgtctctactaaagagacaggtgaaaccctgtctctctaaaaccacaaaaatcaggcaggcatggtggcacatagctataatctcatctacttggaggcacgagaactgcttgaatccaggaggcagaggctacagtgagccgagatcatgccacagcactccagccctggcgagagagcaagactgtctcaaagaataacttcaaagatggaagttatttaacctctctgctcaaaagcctcagtgcttccctatgtcaatccaggtaaaatcctatattgacgatggcttcagggtcttctgtgagctggccactgcttacctatgacctcatcttgacaatcctccctgtctcactcatgcccgctgcctggatgttctattttacgtgtcagtcacatgtatcttcagggcctctgcacaagctatttctctgcctggagaactcccccccgagctctatgactcggtctcttcaccccctcacctccaaccattgtagccagaacccccagttattccctgtaccccttgcccttcagaacccctcatcgcctccatattttcctgttagcagatgagccctgagggcggagacgttttgtttgttttttgagaccggagtctcactctgtcacccaggctggagtgcaatggcgcgatctcggctcactgcaacctccgcctcctgggttcaagcgattctcctgccccagcctcctgagtagctgggattacaggtgcctgtcaccacgcccagctaacttctgtatatttagtagagacacggtt[136 bp omitted]acgagggtgggcttggcttgccggagggcatcgatcagcactggctgcattaacgtgttgatttctgtgtttccccaggttgtggggatgttccatccctccgttcagttgtgaagacctctgctctgccctcagctgcaaccagagcctcgtcactctggacctgggtcagaatcccttggggtctagtggagtgaagatgctgtttgaaaccttgacatgttccagtggcaccctccggacactcaggtatgatccatttacttccccatcaggctttctccagagtggtaggtttaggggaagcataatgacatggacctgctgtaggagactgatctggtagctggattacaggttcccgccatcacacccagccaatttctgtatttcacttggagaaacggggt[142 bp omitted]ctatgttccccaggctggagtccagcagcacaatgatggctcgctgcaggctcgctccagctcctgggctcaagcaatcctgcctcagttcctgagtaggtaggtttataagcatgaaccattgcacccagccacggctgccgtctacctgctcatgatagccatttgtcactgggctgtgttttgtttgttgcattttgtcagggttttggggttttgttttgttttttctttctttttttttttttttttctgagatggagtctcactctgttgcccaggctggggtgcagtggttgctaactgcaacctccacctcccaggttccagctattctcatgcttcagcctcccaagtagctgggattacaggcatgcaccaccacacctaggtaatttttgtatttttagtagagacagggttttgccatgttggccagggtggtctcaaactcctgacctccgtgatttgcccacctcagcatcccaaagtgctgggattacaggcatgagccaccgcacccggcctgagttgtattttgataccatggcatcaaagaaccaagaagccccttcctaggaatgtgggaacttcagaaattctcacaagcaatatactctactgctggcttaaaataatctttatgtagaagaaacatagattacttgtttatttaacatgaaactcagcctaagatactttgtaagtcaaaagacatatggacactaagggtttttttaagctttaagtttgtttgtttgtttatttattatttattttggagacagttttactcttttttttggggtgcatcttttttcttttttttttttttttttcctttttttttttttttttttttattgatcattcttgggtgtttctcacagagggggatttggcagggtcataggacaatagtggagggaaggtcagcagataaacaagtgaacaaaggtctctggttttcctaggcagaggaccctgcggccttccgcagcgtttgtgtccctgggtacttgagattagggagtggtgatgactcttaacgagcgtgctgccttcaggatctgtttaacaaagcatatcttgcaccgcccttaatccgtttaactctgagtggacacagcacatgtttcagagagcacggggttgggggtaaggtcacagatcaacaggatcccaaggcagaagaatttttcttagtacagaacaaaatggggggctgacccccccacctccctcccggacagggcggctggccggttagaggggctcctcacttcccattaggggcggccgggcagaggcgcccctcacctcccggacagggcggctggctgggcggggggctgacccccccacctccccgcccggccagagttttactcttgttgtccagcctggagcgcaatggcgctatctcggcttactgcaacctccgcctcccgggttcaagaggttctcctccctcagcctcccaagtagctgggactacaggcatgtgccaccacacctggctaatcttgtatttttaatagagacagggtttctccatattggtcaggctggtctcgaactcctgacttcaggtgacccgcctgcctcagcctcccaaagtgctaagattacaggcgtgagccaccatgcctggcctgcatctcctctgtttaactggtactccggggtccactgagtagaagttgccaaagtgggtgatagagcgggtaagcaggtattagagctatagcccagctgtactcagcaattccattttctgtgtatgataatcaacaagcatctcaaactgcacaatggctatataccattacaaggttaacctgatgttatgtttttctctatcagatcaacatggttgagaataagaggaatgaaaaaaaggattaaaaagagaaatgaaagtctttaatattacattttattatttacttcatttattttttagacaaaaatctcactctattgctcaggctggagtgcaggggcccgatctcagctcactgtaacctccgcctcccaggttcaagtgattctcctgtgtcagcttcctgagtagctgggattatagggatgcaccatcacacccaactaacttttatatttttagtagagatggactttcaccatcttgcctaggctggtctcaaactcctgacctcaagtgatctgcccacctcactctcccaaagtgctggcattacaggcatgacccaccacatctggcctcattttatatttaaaaataaaaaataagcaaatcaagccaggtacagtttaggcaacatggtaaaaccccaactctactaaaaatacaaaaattagctgagcatggtggcaggtgcctgtagtcccagctactcgggaggcagaggataggatggcttgaacccaagaggcacaggttgcagtgagctgagatggtaccactgcactccagcttgggcaacagagagactgtctttttttttttttttttttttttttttttttttttttttgagatcgcccaggctggagtacagtggcacgatctcggctcactgcaagctccgcctcccgggttcacaccattctcctgcctcagcctcctgagtagctgggactacaggcgtccgccaccacgcccggctaattttttgtatttttttagtagagacagggtttcaccgtgttagccaggatggtcttgatctgctgacctcgtgatccacccgcctcagcctcctaaagtgctgggaattacaggcgtgagccatcacgccccacctgagactgtcttttaaaaaaaaaaaaaaaaaatcaatgtggaacactcctttgccacctagaataatcaggaaaggtgacccatgccctgtgcctccttaacagactttcaggtacttgggaatttgaaacaaatctccttgatgcacaaagtaaccttttcttcccccattgtaccccaggttgaaaatcgatgactttaatgatgaactcaataagctgctggaagaaatagaagaaaaaaacccacaactgattattgatactgagaaacatcatccctgggcagaaaggccttcttctcatgacttcatgatctgaatccccccgagtcattcattctccatgaagtcatcgattttccaggtgttggtgaactgcctgtgactcctctcctccccggcccctacccctcagggataatgagttcattgctgggctagatgttttagccatgattctgcctctgttttatacctgcacacatccttatctttgttacatatgaaatatctgtatcacgggtatattgagagaaataaaggtgagagcattcacaaatgaagctgttacttaataatgggctttgacaagttagagaaaagatatcttactgggtagaacctggggggtgggggaagtgacagtgtttaattgcattgatttctattgccttgtcaatctttgccttgccttggtatttcctttcttttttcttttctttttttttttttttttttttagactgagtttcactctgttgcccacgctggagtacactggcacgatctcagcttactacaacctggcaggttcaagcgattctcctgtctcagcctcctgagtagctgggattacaagcatcccccaccacacccggctaaatttttttgtatttttaatagagatgaggtttcaccatgttggccagtctggtctcaaactcctgacctcaagtgatccacccacctcagcctcccagagtgctgggattacaggcatgagccactgtacccggcttttttttttttctttttctttttcctcaagcatgagtgttgctctgttgcccaggctggaatacagcagcatgatgatagctcactgcagcctcaagctcccaggttcaagcgatcctccagcctcagcctcctcagtagctgggactacaggtgcacaccaccaaaccaggccaatttttgtgggattttttttgaagacagggtctcactatgttgcccaggctgatctcaaactcccaggcgcaagtaatattcctgcctcagcctcccaaagtgctaggattacaggtgtgaaccactgtgcctagcctgtcttgttacttgttgacctgcgtggatcactgcctgctgagtattacttgccagaggatttctcctaccaatctacaatattttaggtgcttcggtgtagctcatatatgaccatgtcattgctctgattttgctttttaaaaattctaacttaaaatagaatctcggccaggcacggtggctcacacctgtaatcccagcacttcgggaggctgaggtgggtggatcacgaagtcaggagttggagaccaacctggccaacgtggtgaaaccccgtctctactaaaaatataaaaaattagccaggcatggtggcacatgcctgtaatcccagctacttgggaggctgaggcaggagaattgcttaaacccaggaggtggatgttgcactgtgctgaagactgcactactgcattccagcttgggcaacagagtgactccttctccaaaaaaaaacaaaatctcatggtatgcatagtttttcactatagagtctccattatttccttgtgatacagaattccaaattcaacaaagcagcagtgcaagctctacgctgtaaaaccacaaacaaaacgaactgtactataaagacaacactagttggcaaagttgcttctcatggggagactttgttgctgtctgtgtttactggatgagcaaacaaatggacggtaagggggaaaaagaacagtacaaatttttattaaacactaatcatgtttttttttgtttgttttgagacagtttcttcttgttgcccaggctggagtgcaatggcacgattttggctcactgcaacctccgcctccccgggttcaagcgattctcttgcctcgacctactgagtagctgggattataggcatgtgccaccaagcctggctaattttgaatttttagcagagacggggtttttccatgttggtcaggctggtctcgaactcccgacctcaggtgatccaccagccttggtctcccaaagtgctgggattacaggtataagtcaccgcacctggcaacatttttttcttttttttttttttttttttttttttttttggtggcagaatcttgctctttcacccaggctggaatgcaatggcacgatctcgggtcactgcagcctccacctccccagtttaagcagttctcccatctcagcctcccatgtagctgggaccacaggtgtgcaccactgcacccaggtaatttttgcatttttggtagagatagggttttgccacgttgtccagactggtcttgaactcctgagctcaggtgatctgcccaccttggcctccccaaatgctgggattataggcatgagccaccacacctggtcaaaagtagttttaatatttaaatttaaaactaaaaaagttaatctctcttcctactttcatttcttcatcaggggctattggtttattcccaccgactagatccaagttctctgatactacctttaaaccactccatcactttccagttccactgcatacagtgtgggcttctgaggtttcctggttcaaggtgtccttgttcaatgcggcatgggtcattccctgagcatttttttttttttttgacagtctcgctccattgcccggtttggagtgcagtggtgtgacctcggcttactgcagcctctgcctcccaagttcaagcaattctgcctcaggctcccggataatttttgcatttttagtagagacagggtttcaccgcgctggccaggctggtctcgaacccctaacctcaagcgatctgcctgcctcggtctcccaaagtgctgggattacagacataagctaccgtgcccggcctccagagcatctttattctcagtttcagcgggaagaagggggaaggttggtaaaaagagaggcacaaagtttaaaaaggacattgcgtgaagaaactaaaggtttctccttctccacactattgacatttgggatcggatcactactcgttgggaaacgtcctgtacatttccagggtgttcggcaccatccctagcctctaccccctagataccagctcacatcctcacagttaacagtgatcaaaaatgtctctgggcagtagaaaatatttcctgaaatgcaaagttttcttaggttgagaaccattgtaatctagccccatctttagagaagaaattgagtaacggatctacatccattgaggaactatcgacaccccaggggcccatgaaatgtaaactcgcactcacaattaaccatctttctccaacgtgtgtatttcatgtagccacactctcagatgcccacccccatgacctacaagtcctaaacagggaaacctgtggcacatgggttcatgtgtgtctgaatctatacgttcagagatgaacaagtactgctctccctatacctgtgaccactcgcctccgcccatcactgaattctgaaaatgtggcctcaggctcacagcagcattagcacttgcttgctctggatctcatcacattgatgatcaagaacaaagtattcactgggttctctgctaaggatacaaaaaaaaccattccacaattccacggccatgtttgcacccaggaaccacgagggctgggttagcccagatggtgggcttgggaaatgttcctggagcaaaaaaaagagccagaagtcatgagagcctgaccccctcccccaacgcgcacacacacacaccactctctacctccaagcctcattttcaggcttctcaaagctaaggtcactcccatgagctaagccgcgcttttctcaatcctcagctcttccacaagaataggaagaactctctcctgttcaagatcctgtggctcagctgcagctctggaagaaagaccccggtgagggtcttgcttttcacaatccccaatcccagaccacatcctgtgccccaaaacaacttccatggtaaccacatccttcaggaagtgaagtcaggcaggaagtcaagtcagaagacggaatgggctgggcatggtggatcgcacctgtaatcccagcactttgggaggcagaggcaggtggatcacatgaggtcaggagtttgagaccagcctggccaacatggtgaaaccctgtctctactaaaaataccaaaagtagccaggcttggtggtgcatgcctgtaatcccagctactctggaggctgaggcaggagaatcgcttaaacccggaaggcggaggttgcaatgagccgagatcgcaccattgcactccagcccgggggacagaaaaaaaaatgtagctgagcatggtagtgcacgtctgtgatctcagctacttgggagtctgaggcaggagaatcacttgaacccaggcggtggaggttgcagtgagccaagattgtaatagtccaatgtgttcaccttgcccactgcctagacagagctgattcgtcaagacagggaatcgcaatagagaataattcatgcagagctggctctacgagagaccagagttttattattattcaaatcagtgtctcccagcattcaggaagcgtttttaaggataacttggtgggtgggtgggaagccagtgagccaggagtgctgtttggtcagggatgaaatcgtgggagccaaagctatcttcttgcactcagttcctgagtggaggccaaaagataagatgggccagtttattgatatgggtggtgccagctgatccatcaagtacagggtctgcaagttaaacgctgatcttagaagcagtttagggagggtcacaatcttgtagcctccagctgcatgactcctaagtcataatttctaatctcgtggctaatgttcgtcctacagggccaatctagtccccaggcaacaaagaggtgtgctttggaaaagggctatcatctttgtttaaactataagtttctcccaaagttcagcctatgcccaggaatgaaaaaggacagcttggaggttagaagcaaaatggagtcagttaaatctctttcactgtctcagtcataattttggaaaggtggtttcaagctggcacaactgcactccaccctaggagacagagcgagaccctgtcaaaaaaaaaaaaaaaaaacaagaagtgaagtcaagataggaggtaaattcggaagacaggaagtggtggtagaagacaagaagtgaagtcatacaggaagtaaagtcagaagacaggaagtgaagtaagaagacaggaagtggttgtagaagacaggaagtgaggtcatacaggaagtaaaatcagaagacaggaagtgacgtcaaaccaggatttgcagtcggaggcaggcaagaagtgaaatcagaagacgggaagtggctgaggggaacgtcttttctctctcctgctcagcccgaagtgaacaggtagcatcaggtgtgccatttcagtgactgggcacagcccaggcacccacatctctctgcagcgcctattcttggaacaccagagacctctacactattttctgttgcttttttccttcattttcagagatgagatcctggattgaatgactactatggaaagtgattgaccaaggtaagtcacaactatcttgttctttaattttggtgttgtttgttatgacttgttagccgtctagcactcatagctttgcatttccactctgcattacttgtatttttattattttgtgatattcgtaataatttattataaaactgtgttatttttggatatttttaagttaaaatgcgattttttaactaagtggcagtatgcaaagcaagtggttcagaactctcccccattaataagtcttctctcctgaaagaaacaattttgagacttcctgttcttaattctgtttaacagcatacttctaaaagaaaaagtgtatactgttattatttattgtgttacaaaaatatacacgcacctttcatgcacgtccgtgtgaagagaccaccaaacaggctttgtgtgagcaataaagcttttaatcacctgggtgcaggtgggctgagtctgacaagagagtcagcgaagggggataggggtggggccgttttataggatgtgggtaggtaaaggaaaattacagtcaaaggggggttgttctctggcgggcagagtcggggtcataaggtgctcagtaggggagcttttgagccaggatgagccaggagaaggaatttcacaagacaatgtcatcagttaaggcaggaacaggccattttcgcttcttttgtggtggaatgtcatcagttaaggcacgaaccggccatctggatgtgtacgtgcaggtcacaggggatatgatggcttagcttgggctcagaggcctgacattcctgtcttcttatattaataagaaaaataaaatgaaataggggtaaagtgttgggacagcaaaaatttttgggggtggtatggagagataatgggtgatgtttctcaaggctgctttgagcaggattaggggcggcgtgggaacctaaagtgggagcgattaagctgaaggaagattttgtggtaaggggtgacattgtgggattgttaaaagaaacatttgtcatttagaattattggtgatggcctggatacagttttgtatgaattgaaaaactaaagggaataaggaaaggagaaaaacaggtattaaaggtctaagaattgggacgactcaggacatctaattagaaagtgcctaaggaggttcagcatagccttgccagcaaagattatttatttattttaagagttaacagtggcggtatggggatagtaccaggagataccagctgtgctggcttggagaaacagtgtaaactggcagtgtaaacaagagcagggcatgtgtgagtagttgagaacggtgaataggagtatgactagacagaagatagtagggatgacaagttttttggggcacaatctaagttggtctggtgtctggaatgagactggggcctaataaaaaggagtgtctacacaggagcttaaatgggctgtatcttgtagcattccaaggacaggcctgaattctggaagcgaaaatggtaaaagtattgtccagtcctttttaagttggtggctgagcttggtgaggtgtgtttttaatagaccattagtctgtcactgaatactaagagcctgaaaaaatgcttggctgatttgactaataaaggctggtctgttagcagactgtatagaggtgggaaggctgaactgaggaattttgtctgacagaagggaatgacaaggctaaactgaagaattatgtctgacagaagggaagaaatgactgcggtggccttctcagaccctgtaggaaaggactgtacttacccagtgaaagtgtctacctagactaagaggtattttagttatcttactcggggcatgttgagtaaagctaatttgccagtcctgggcgggggcaaatccttgagcttgatgtgtagggaagggagggggcctgaataatccatgaggagtagtagaatagctgatgcaacactgagaagtgatttctttgaggatagatttccacaatggaaaggaaatgagaggttctaagaggctggctagtggcttgtaccatagcatagcctgcctttgctggtgtgtggcgattaggcctggtggaaccgccatcaataaactaagtgtgatcagggtgagaaacagggaagaaggaaatgtggggaaatggggtgaacgtcaggtggatcagagagatgcagtcatgggggtcaggtgtggtatctggaataatgtgggaggccagattgaagtccgggccaggaacaatggtaattgtgggacttaacaaagagtgagtacagctgaaggagccagggagcagaaagtatatgcatcaggtgtgagtaagaaaatagattttggaaattatgagagctgtagagagtgagttgagcatagtttgtgattttgagggcctctaaaagtattaaagcagcggcagccacagcacgcagatatgagggctaggctaaaacagtaaggtcaagttgtttggacagaaaggctacagggtgtggtcctggctcttgtgtaagagttctgaccgcgctaaccatgcctaggaaggaaaggagttgttgttttgtagaaggtgctggggcttgagagatcagtcagacacgatcagcagggagagcacgtgtgtttttatgagaattatgccgagataggtaacagatgaggatgaactttgggcttgactgaagtaatgggggctgtctgtgaaaccttgcagcagtacagcccaggtaatttgctgagcctaatgggtgtcagggtcagtccaagtgaaagcgaagagaggctgggacgaggggtgcaggggaatagtgaaaaaagcatctttaagatcaagcatggaatagtgagttgtggaggaaggtattgaggacaaaagagtgtaggggttgggcaccacagggtgcataggcaaaacaatttgataaggcgcagatcctgaactaatctgtaagacttttccggtttttggacaggtaaaatgggggaattgtaaggagagtttataggttttagaagcccatgctatagcaggcgagtgataacaggctttaatccttttaaagtgtgctgtgggatgggatattggcattgagcagggtaagggtgattaggttttaatgggatggtaacgggtatgtgatcagttgccagggaaggagtagagatgtcccatacttgtgggttaaggtgggggaataggagaggaagacgcgaaggaggctttgggttgaggagaagggtggcaatgagatgcggctgtagtccaggaatagtcagggaagcagataatttggttaaaatatctcggcctaataagggaactgggcaggtggggataactaaaaaagagtgcataaaagagtgttgtccaagttggcaccagagtgggggagttttcaggggtttagaagcctggccgtcaatacccacaacagttatggaggcaagagaaacaggcccttgaaaagaaggtaatgtggagtgggtagcctccgtattgactaaggcgacggacttaccttccaccgtgagtgttacccgaagctcggcatccgtgatggtctacagagcttccgaggcgattgggcagcatcagtcttcagccgctaagccgagaaggagtcagagagccttgggccagagttccaggggctctgggagtggctgccaggtgagttgaacagtccgatttccagtggggtcccgcacagatgggacacggcttaggaggaatcctgggctgcaggcattccttggcctggtggtcagatttctggcacttgtagcaagctcctgggggaggaggttctggaggaacgcctggccgctgcggttcagttcccttcttgtgtgctggagatgtggctggggtttgtctcacagtggaggcaaggaattgcaacttttttctattattgtacaccttgaaggcgaggttaattaaatcctgttgtggggtttgagggccggaatttaatttttggagttttatttaatgtcgggagcagattgggtaataaaatgtgtattaagaataagacggccttttgacttttaagggtctagggctgtaaagcttctcagggttgctggcgaacgagccatgaattgggctggatttttatatttgatgaaaaagagcctaaacactatctgatttgggataaagaaaaaggagcattaaccttgactatgcctttagctccagccacctttctaagagtaaattgctgggcaggtggaagagggctagtcactgaacgaaactgtaagctggaccaggtgtggggaggggaggtgataaaaagataatacggtggaggagcggaggctgaggaagaattgggacctagctcagcctggggaggagggagaggtcagacgggtctgtagaaaaggaagattagaaagactcagcgacgcttggggttgagactgaggggacaggcaggagggaaagaaggaagatttgggacgagttgcactgggcacagagactaggaagggactgatgtgtaaaagaatgcctggacgtcaggcacctcagaccgtttgcccattttacgacaagaattatttagatcttgcaggatggaaaaattgaaagtgctgttttctggctatttggaactgctgtccagtttgtattggggtcaagcggcattgcagaagaaaataaggcatttaggttttaggtcaggtgtgagttgaagaggttttaagtttttgagaacacaggccaagggagagaaggaggaggaatggagggtggaaggttgcccatagtgaaggaggcaagcctagagaaaagagagagtagagacacggagggaaggggttcgggagttcttaccttccagaaaagcgggaaaggggttggggcatggatataaggggttggggcacagagataagaggttggggcatggaaataagggatcagggtgcagagatacgaggttggggtacttgcccctctagaaaagcgggacttgccgctaagagtgaaggagaaggggttgggggtttcttgccccccagaaaggtggagaaggggtagagacatggagaggaggggttggggaacttgccccttccccagaaaagtgggacttgccactaagggtgaaggaccaaggcaggcatccctgcgtgatctgacacctctgaagcgtgggtatataatcagagaggcgtccctgcaatgattaaacgccaagggaaggctgccttccctagtccgtgaccggcgccggagttttgggtccacagataaaacgtgtctcctttgtctctaccagaaaatgaaaggaattgaaattaagagaagggagagattgaagagtggaaaggagaaagtggttgagggacagtgagagaggttggagaagagagtaagaagaggtcgcttacccaatttaaacttggtgagatgttccttgggctggtgggtctgaggacctgaggtcgtaggtggatctttttcacagagcaaagagcaagacaggggattgatctcccaagggaggtcccccgatccaagtcacggcaccaaatttcatgtgcgtccatgtgaagagaccaccaaacaggctttgtgtgagcaataaagcttttaatcacctgggtgcaggtgggctgagtccgacaagagagtcagcgaagggggatggggtggggccgttttataggatttgggtaggtaaaggaaaattacagtcaaagcggggttgttctctggcgggcagagtgggggtcacaaggtgctctgtaggggagcttttgagccaggatgagccaggagaaggaatttcacaagacaatgtcatcagttaaggcagtaacaggccattttcacttcttttgtggtggaatgtcatcagttaaggcaggaaccagccatatggatgtgtacgtgcaggtcacaggggatatgatggcttagcttgggctcagaggcctgacagcacctacctaaaaaattccaatagcactaaaagggtgtgtacaaaatgcagtggctgactaaccatctcctccattgctccgcctaagagacacccacttttagctgttttctttaggaacttgttaatattaggtttctaaaaacatgtaaccatgtgaatgagcttagacttactggattcctatcataataggcggggccttagttattctacagcgttgttcttactgttttttctcttccaatgtttatctctatgtctgcatatcaacattcagtatcacattttttttttttgagacagagtctcactctgtcacccaggctggagtgcagtggcgcaatctcagctcactgcagcctcagtctcctgagtagctgggactacaggcgtgtgccaccacgactggctaatttttgtatttttagtagagacagggtttcaccatgttggctgagctggtctcgatctcctgacctcgtgatctgcccacctcagcctcccgaagtgctgggattacaggcatgagccaccacgcccggccagtatcacatgtttatacccacagatattcgcagccgagaattttcgggtaatataacttgcttcttttatttttgttgttgttattgttcccctaaagtttatatttgttttttatttttattttcttttgaggcagggtctcactctgtcacccaggtttgacagcagtggtgcaatcatggctcactgcagcctcaacctccccgggctcaggtgatccccaacctcagcctcctgagtacctgagagtaggcatgtggtaccacacccagctaattttttatattttttgtatatgagacaaggtttcaccatgttgcccaggctggtctcgaactcttaggctcaagcgatcccgcctcagcctcccaaagtgctgggattacaggtgtgagccactgtgcctaggctatactggtctttttaaaatctacttagtttacttgacctctaaaattatttttcctctgtcttctgatagcatctcagtatgattttccactatgttaagacgaggaattgacccattcttacatttggaggcttctctaagcaactttcccattcccccttcacccaagctgtgtgctcactagccctgattcacagccgtcgtcctggaacttcttggtgccatccttctgtcttttcccaagtgactcacctacctcaacctcccaaagtgccgggattacaggcgtgagccactgtggccagccattcttttccttttttaaaacaatttttatcttctttattttaagtagagatggggtctcactatgttgcccaggctggtcttgaactcctgggctcaagcgatcctcctgccttggcctcccacagtgctaggattacagacatgatccactgcacttggcccagtggtacagttttacactcattagatggtcaagaaatgcctaaacgctataataaatatagaactttaccttgagaagacctaacatttccttcagaaagtaaatatgagaggggtggagacggtgcattatcttatttttatgattttaaaaatgtatacagaattgtacatatttatggggtggacagcaatattgcagtacatgtatacaacgtgctatgatcaaatcagggtaattgacatattcatccctgtattttttgagacaaagtcaggcttcgtcacccgagctagagtgcagtggtgtgatctcagctcactgcaacctctgcctcccaggctcaagccattctcccacctcagccccctgagttgctgggagtatagggatgcaccaccacacctggctaatttttgtgtttttttgttttgttggtagagatgaggtttcaccatgttgcacaggctgatcttgttttctaatgtgaagggaagcgggcaacgtgctagttttacactaaggaaaatgaatgacatacccaaactgcctgcaagacccgttctgagagacgaaaggagatttgttagaccgcagtgggagatggagtgagggtgagagtttctggggaaaaccagacaagagcacagagggccaaagggaagcacgggaggattttgcacagaggatggaacagagtcaaccctgagagctgggaaccttagagatccgtctggagcccatattagagaggttgaagaaagaggccagtatgtggtccagccagggtaccatgtcatccacagtgtgcagggaggaggatggggtctccacagattccttccatcccaaatggagggtgccctcagacagagaggcagacagacagacagacactggccgaacggctccctgatggaacaccaggaggaggcagcatggcctcgtttccacagctgtagcctctgccctcctgcttccacgctccacacacgccagtctttgagtcgcctcccatgccatgatccctcccttggatacgaccgtgcctggggttcagcggtcatgaacataacccgcggctgtgaacatcctgtcggcctccatcctgacccccgtttgatttccgggtcagcgggaggggcgggaggggcggaagcggcctctgcacagccctgcccctgtgccgcaggcgcttcctccggctgtgccagtcctctgccagaaaccccgccaggattattaggatcacagccccgaggcatatccggaccaggttgcccttggtgtagtactggcgggcaggacctggaggaatgaggagaggcaggagcaggtgaaagagcccacctccaggaccccctccaagccacatctgggcttctcagagatcctattattctctactagctaggggatgccgctcactttcctggagggtccctcccttcccgagtaggggtcagggccagatgaccccaattctctaagtagcacctctccctcctgtgctctcacagggctctgagacaactcctccccagacacagatgctgcctcgttatctgatgcattgcaaaagagaggacagttataaggggtggggaagagatggaatctctctttctctgaccctttttaaaatctcaaccttcccacctgatcttaatgcccaattctgaaccccatacgctgatattctgcctttactctacacactggaacccaagatctgagagctgcagcccctgcgtagacaaaggagttggctttggtgaagagacgggtgagaaggaagggggtctggagaggatgacttactcaccagctggagagtctgactcctttggactggcggtgatactcctagaagtctctgggaaccaaacaaaggctaagtgtgaaatgaaaccatattcccgccccctgtcactgtgcctactccgaacacacacacacatggggaggcacaattccacagcatttaagaaaagcatgggccgggcacggtgcctcatgcctataatcccagcactttgggaggctgaggtaggaggctggcttgagtccaggagttcaagaccaacctgagcaacatagaaaaaccctatctctacaaaaaaatacaaaaattagccaggcgtggtggcacgtgccagtaatcccagctactcagtggaggctgaggcaggaagatcacctgagccctgggaggttgaggctgcagtgagccaggattgtaccactgcactctagcctgggaaacagagcgagaccctgtccaaaaaaaaaaaagcaagaactgtagagtcaggctgtcctccagatttgaaccccaactctatcacctattagatgtcagttatctggcaagtgactcagcatctgtgagccagttccccatgtgtccaataaaattaacaagatcccttataggttgatgtgaaagtcaagataataataatggtagaaatataaagcaccgtgcttgacatatgagcacctcatacgtgccagcttttttttttttttttttgagacagagtctggctctgtctcccaggctggagtgcagtggcccgatgtcggctcacttcaacctccgcctcctgggctcaagcgattctcctgcctcagcctcccgagtagctgggactacaggcgtccgccaccacgcccagctaagttttgtatttttagtagagatgggatttcacc[137 bp omitted]caggtactcagccatgtgctgggccatgggaacccaaatattaataagacattgtcaggccaggcatgacactggctgaatgcctgtaatcccagcactttgggaggccaaggtgggcggatcacctgaggtcaagagatcgagaccatcctggccaacatggtgaaaccccgtctttactaaaaatacaaaaaatagctgggcatggtggcacacacctgtagtcccagctactcaggagccggagattgcagtgagctgagatcgcagagtgagccgaaatcacagatcacagagtgagcagagtgagactccgtctcaaaaacaacaacaaaaaacaaaaaaaccataagacattgtccatctgcggttcccagactattgcaggagaccaaaaagtaaagcgatttttttttttttttaatacggagtctcactctgttgcccaggctggagtgctgtggtgtgatctcaggtcactgcaacctccaactcgtgagttcaagcgattctcctgcctcagcctcccaagtagctggaattacaggtgcccaccaccacgcccggctaatttttgtattttcagtagagacggggtttcagcatgttggccaggctggtctcctgacctcaggtgatccactcaccttggcctcccaaagtgctgggattacagacaaagcgataattttaatatactgtaaaaattgctgtaataggcagcccacaagacactgagcgagagcagaggaaaccatcgatccagcctggacggtcaaggctttcttgaggaattgatgccatggggaaatggaagaaaaggcagagtgagtgggttgggtgcagagtcaggagaggttaggaagcctccaggagagcttcaagtgactgtgtgtggctgagaacagcatgggaatgcgtggaaggtatgcagacaaaattggagggatcaacaggggctggatatctaagctcacagaatagcaagctgaggaattggaactgcatcctgagggtgattgggaggttccgaactgaagatagggaaggcttccatcacagaactccctgggatatgccgggcgcggtggctcatgcctccaatcccagcactttgggaggccgagacaggtggatcatgaggtcaggagttcaagaccagccttcccaagatgctgaaaccccgtctctactaaaatacaaaaattagccaggtgtggtggcatgcacctataatcccagctactcgggaggctgaggcaggagaatcgcttgaacccgggcagcagaggttacagtgagccgagatcgcaccactgcactccagcctgggcgacagagcaagactccacctcaaaaaaataaaaaatagaactacgtgggatcaggtgcctcatgaaagccagagtcatgtgggcccagtggaagtatctaacctattatcagggaatctgtgaaggtgtttagtctggaaggaaatggagattttccaggacaggcaaggggaaagagactgaggaaagcgtatctgcagaggcctggagcggttagaagatgtgctgtgtccaggtgcctacagtctgtgtgcgtccgagcatgggctctacctggacacagtgaggagcgagattaaatacctggatcacagccgagtccaaagcctaggacttcatcctgggagcagtgcgtagggatggcggtcgtcccgccacagccttggctccgccatctttgaaatggccccatcacccaaaacgctcctccttctgaaccccagagctccactctgcacccatgctctagcctcacaccaaggactttcttggtaagagacggacagttcggtgaagtgattaaaagcctacaggcttagataatggaagagagagctccgtcctcacactcctttctgctgagcatgaaatgcctggttactcaccagttgtgaagacttcgtttgtgaatgagacggtcagttcagcggtggcttctgagaattctaagaaagcaaaacaatgttaggtcttccccgtggttccctatatcctctagatatctccattccccttttgagatatctaggctccctgaaacccctttctctgacacactgcacagacactgaagacagacaaattcgaaaggtgtaagacttatcttccatgaccggcttagtaagaagcagatccgttcagcaattgatagacacttggttttttttccacgttttgctgttatgaatattgctgctgtgaacattgacgtacaggtttttgtgtgaacataagttttctgttctcttgggtacacacccaggggtggtggaatcactgggtcatacagtaactctgtgttttactttttgaagaactaccagacttctttcttttttttcttttttttttttttttgagacagagtctcattctgttgcccaggctggagtgcagtggcgcgatctcagctcactgcaacctccacctcctgggttcaagcgattctcctccctcagcctcccgagtagctgggattacaggcacctgccatcacgcct[139 bp omitted]tgtttttcaaagcagctgcaccattttatattcccaccagcaatataagaaggttcttccaaatcctcaccaatacttcttgtccgtttgttttgttttaaaaatcatagtcatcctagttggcatggtgaattttatggtatgtgaattatatctcagtttgaataataagatgtggatccatgtcttcgtgagcctagaggaagaatgagctcgtgttagcctcagaacacgggatctccaccttccaacttaggccattttctttttttctttttttttttttttttg[132 bp omitted]caccacgcctggctaatttttttgtattttcagtagagatggggtttcaccgtgttagccaggatggtctcgatctcctgaccttgtgatccacccgcctcagcctcccaaagtgctgggaatacaggcgtgagccaccgcgcccggccaggccattttcttaaccaggggcctcctgaggccaccaaaatattcctgaactgcctcagctgataaatacgaagctcttgttgcagtgggtactatcctgggagtctttttatggtggaaccagcttggaaaaaactagtttatgctcagctctcggtggcataatgagagtgtgggtattatttggtctttgttatttctcttcgtgtgagatgcattaataaaccttttttttttttttcaattaaaatttcagttccagaatccatgtgcaggacgtgcaggtttgttacataggtaaacgtgtgccatggtggtttgctgcacccatcaacccatcacctaggtattaagccccacacgcatcagctatttatcctgatcctctccctcccccaattccccctacaggccccagtgtgtggtgttcccctccctgtgtccatgtgatctcattgttcagctgccacttacaagtgagaacatgcagtgtttggttttcagttcctgtgttagtttgctgaggataatgttttccagctccatccatgtccctgcaaaggacatgatctcattcctttttatggctgcatagtattccatggtgtatatgtactgtatttgctttatcctttctatcattgatgggcatttgggttgattccttgtctttgctattgtgaatagtgctgcaatgaacatatgtgtgcatgtatctttataatacaatgatttatattcctttgggtatataaccagtaatgggattgctgggtcaaatggtatttctggccaggcgcagtggctcacacatgtaatcccagcactttgggaggccgaggtgggcagatcacctgaggtcaggagctcaagaccaccctggccaacatggtgaaactcccgtctctagcaaaaatccaaaaattagccaggcgttgtggcatgcacctgcagtcccagctactcgggaggctgaggcaggagaatcacttgaaccctggaggcagaggctgcagtgagccgagatcatgcccctgcaatccagcctgggtg[148 bp omitted]aaaaccccatctctactaaaagaaaaaaaaaaaaaaaagccaggcatggtggcaggcgcctgtagtcccagttacttaggaggctgagacaggataattgcttgaacctgggaggtggaggttgcagtgagccgagatcgcaccactgcactccagcatgggctattgagcaatactacatctcaaaaaaaaaaaaaaggaaaaaggatttctggttctgggtctttgaggaatcaccacactgtcttccacaatgaactaatttacattcccaacagtgtaaaagcattcctatttctccacagcctcgccagcacctgttgtttcttgacttttgttggttttttttttttttttttgagatggagtcttgctctgtcgcccaggctggagtgcagtggcacaatcttggctcactgcaacctccgcctcccgggttcacgccattctcctgcctcagcctcccgaatagctgggactacaggcgcccgccaccacgcccggctaattttttgtatttttaatagagacggggtttcaccgtgttagccaggatggtctcgatctcctgaccttgtgatctgcctgcctcggcctcccaaagtgctgggattaccggcgtgagccaccgtgcccggcgtttcttgactttttaataatcgccattttgactggtgtgagatggtgtctaaatgtggttttgatttgcatttctctaatgattggtgatgttgagcttttttttgtatgtttactggctgcataaacgtcttcttttgagaagtgactgttcatgtcctttacccactttttaatggttttttttttcttgtaaatttgtttaacttccttgtagattctggatattagacttttgtgaattgatagattgcaaacattttctcccattctgtaggttgtctgttcactctgatgatactttcttttgctgagcagaagctctttagtttagttagatcccatttgtcagtttttgcttttgttacaattgcttttgacgtttttgtcatgaaatctttgcccatgcctgtgtcctgaatggtattacctagattttcttctagggtttttatagttttcgggttttgcatccaagtctttcatccatcttgagttaatttttgtacaaggtgtaaggaacgggtccagtttctattttctgcatatggctagccaattctcccagcaccatttattaacccacagccaatttcatactaaatgggcatttcccttgaaaaccagcacaagacaaggatgccctctttcaccactcctattcaacatagtattggaagttctggccaggataatcaggcaagagaaagaaataaaggatactcaaataggaagagaggaaatcaaactatctctgtttgcagatgacatgatcctatatctagaaaaccccatcatctcagcccaaaagtttcttaagctgataagcaacttcagcaaagtctcaggatacaaaatcaatgtgcaaaaatcacaagcattcctatacaccaacaatagacaggcagagagccaaatcatgaaggaactcccattcacaattgctacaaagagaataaaatacctaggaatacagctaacaaggaaagtgaaggacatcttcaaggagaactacaattcactgctcaagaaaatcagagcggacacaaacaaatggaaaaacattccatgctcatggataggatgaatcaatatcgtgaaaatggccatactgcccaaagtaatttatagattcattgctattcccattgaactatcattgacattcctcacacaattagaaaaaactataaaattcatatggaaccaaaaaagggcccatatagccaagacaatactaagcaaaaagaacaaagctggaggcctcaggctcagacttcagactatattacaaggtgatagtaaccaaaacagcatggtactggtacaaaaacagacacatagaccaatggaacagaatagagatctcagaaataagaccacacatctacaaccatctgatcttcaacaaacctgacaaaaacaagcaatggggaaaggattccctatttaatacaccttgttttgattttgatttcaacacagcgtgtggtatttgcatgccatgtgatacagtttgaatatgtgttcccaccaaatctcatactggattatgatccccaatgttggaggtgggggcctggtgggaggtgtttggatcataggggtggatccctcattgcttggtgctttccttgcaatagtaagtgaattctcacaagatctggctattgcaaagtgtggcatgtcccccagtcccaactctctctctctcttgctcctgctcccaccacatgagacagctaccccctctttgccttctgccatgactgtaagcttcctgaggcctccccaaaagcagaagccagccttctgcttcctatacggccttcagaaccatgaaccaattaaacctcttttcttatcaatgatccagtctcagatatttatagcagcacaaaatcggcctaatatagcatgaaatattgctcagcaatcaaaaggaacacatcattgatacatacagcagcttggatgggcctcaggggcattgcactgagtgacaaaaggatatctcaaacggttgcatactggatgatcccatttacatcagattctagaaatggaagattatagagatggagaacaaattaatggataccaggagttagggatggcaagggaaggagaagggtgtaggtgtgaatataaaagggtagcccaagggaggcccttgtgagacggaagagttctgtacagtgactgcggtgatggtgacgcgaatctacaactgtgacaaattggcatagaactagacacctactttatgccaatgtcaaattcctggtttttatgttgtactctaattacgtaagatgtaaccattagaggaaactggaaaaagagcacatgggattcttctgttctatcattgtagacttcctgtgactctagaaccatttcaaaagagaaagttcaaaaattcagtcagaagcacacgcacacatatgcacgcatgcacacacacacatatgcacgcatgcacacacatatgcacgcacacacacatatgcacgcacacacgcacatgcacgcacacacacatatgcacgcacacagtatgtgaccatcttccatgtccctgcccactaggcataatagccctcactctgccctcaaccccgcaaatctcatccttatcaacctcggctctttccagcatgtttctcctgccttggtgcttcactctgagacacagggaatgttagacacgcccagcctccagcctagcgtatgatattcttaaagtgcaggccgtagtctggtacaccgtattcagctgagatgtttgtgaaagtggaggggataacacgcctcacacaaaacttaccgcagtggttctcaaagcagcattctggagccatagcatcagcatcacctgggaacttactaggaatgaaaatgactggattcaccccagacctactgaagcagaagccctgggggctcagaaatctattctttaagcctccaggtgattcttatgctcatggaagtttgagaaccgctgatcaatgcattcagtgactcagaaacagagtcccggactctacaggtttgttggttggttggttggttggttggttggttagtttgtttgtttttgtcacccatattcaaccagctggactccacagtatagcaagccactccgattattcttctgcatgttatatgtgataaaccatccacctagagtaggattgggggcagcatcttaacatctaactacttaggacacccaccctgtttacaggcagaaataaaggatttttaaaacaaagcaaatctgtgaaagaaccaactgaattaaatcgagaagtctaggcagagaggagagagagaaggggtccgtgtacctcatacgctgtgcaccagaatggaccctgcagaacctacctgctaccggggaaggtggttctgttggtaaccggctgggggtcacagaggttcctgggaaatcagaaaatgagataaatctgtgctctgtcgctgtgggtcctgaacaaataacgaaacatctccgtgactgagtttcctcaccggaaaaatgagcctaaagtagcttacatcactggactgttgtggatgttaataagcatttgagctgggtgcagtgcctcatgcctgtaatcccagcactttgggaggctgaggagggcagatcacttgaggtcaggagttcaagcccagcctggccagtatggtgaaaccccgtctccactaaaaatacaaaaattagccaggcgtggtggtgtgcacctgtaatcccagctgctcgggaggctgaggcaggagaatcacttgaacctaggaggcagaggttgcagtgatctgagatcgcaccactgcactccagcctgggtgacgcagtaagactccatctgaaaaaaaaaggcttagccaggcgtggtggctcacacctgtaatcccagcactttgagaggccgaggcaggcagatcacctgaggtcaagagttcaagaccagcctggccaacatggtgaaaccctgtctctacgaaaaatacaaaaattagctgggcatgatggcaggtgcctgtaatcccatctactcaggaggctgaggcaggagaatcgcttaaacccaggaggtggaggttgcagtgaactgagatcactccactgcactccagcctgggtgacaaagtgagactccccccaaaaaaaaaaaaaaaaaaaaaagcagcagcatttgtaaagcacacctggcacattctgggctattaacaaggaaatgcatgcagctcccgtccacctttttcaacctcagttctatttcttctggattcctgtgtcctacccctcactgtgaccctgggggcaaaacagatttttctaccaaaaactaaatgatgtattttgtttgatttaatatgacattgttaaatgtactgatcagtggcgttgggtatgttcacattgtggtacaatatgttgacctctagaacttatttttcttgcaaaactgaaattctgtgcccattaaacactaattccttctctctcctctttctggcccttaacaaccaccattgtactttgtgtttctacagtgttgacattagatacctcctttgactagaatcatacagtagttgtccttttgtgactgacttagcataatgtcctcaaggtatatccatgttgtagtatgtgtcagaatttccttcttttttaaggctgcataatattccattgcatgtatataaccacattatgaggtatg[220 bp omitted]gaggcagcagaatcgcttgaacccggaaggcggaggttgcagtgagctgagatcgcgccactgcactccagcctgggtgacagagtgagacttcgtcaaaaaaaaaaaaaagaaacctccattctcccagctgcctgtagcccagggcttcctgccctcccacttccttcccacctctggccccgcccctgcagcccagggcttcctgccctcccacttccttcccacctacggccccgcccctgcagcccagggcttcctgccctcccacttccttcccacctacggccccgcccctgcagcccagggcttcctgccctcccacttccttcccacctacggccccgcccctgcagcccagggcttcctgccctcccacttccttcccacctacggccccgcccctgcagcccagggcttcctgccctcccacttccttcccacctacggccccgcccctgcagcccagggcttcctgccctcccacttccttcccacctctggcgccgcccctgcagcccagggcttcctgccctcccacttctttcccacctatggccgcgcccctacagcccagggcttcctgccctcccacttccttcccacctacggccccgcccctgcagcccagggcttcctgccctcccacttccttcccacctacggccccgcccctgcagcccagggcttcctgccctcccacttccttcccacttatggcccctcccttggaatggccatcaggacctataaaggctgaggaagaaaggtttggtctgcactacccctacctgtgaccacaagctccagggggtcgctgggggctgaccacaggtatgggtccctgctggagaagctgtagcatcggtaggttccgctgtgggcggcggtcaccgtgatgatgggaaaactagccctgtaccatctctcgggattcttgtagggcgcagggtccccttccttgtacagagcaaattggtcaaagccataccgagtctgacactgtagggttacgtcccctcctgacgacaccgccgggccgggctgggctgagagcgagggtttggcaaaaactcctgggagaaaaagaaagtctgatgttgaaggcaggagccagcatctcagctgagactggggaggtccccacacctgcctaagagctggggagctttttggctgtatccctcccagagagcgcactcccccacccaagctcacagagaggtcgagtcacccagtggttgaggaaggaggctgtgctcacgtcctagtgcttgggtgcaaatcctagttctgccttcaggggcctggtggccctggagacaaatctccctctgtatctgagcctcactgccttgttctgttaaaatggggatgactgaatgagacagtacacagtaatttgcagagtgcctgttgcctagcaagcgctggagtaagtaaatagcttaagcttatactgtgctgtaagcttgtattgccacatacaattgttacgttgtaaatgtggctgacagtgctagcttccgggtgccttccaaacttatgatgtatatcagttcagtgaatcctcagagacctatggagtcctcactcttaatgtccctattttataaatgaaactaaggcacatggcattaaataatttgtccaactctaggtaacaatactgcagtgtacagctgaaatttgctaagagggtagattataagtattctcacacacaaaaaagttaactgtgtcaggtgatgtatgttaattagcttgctagtagtaactgtctcacagtggattcgtatatcaaaacatcaacttgtacaccttggatatattccatttttgtttttcaattatacctcaacaaagctggacatattttaatttaaaaataaataaaaaacttgtccaagatcataagtggcagagttgaaatctgcactcacagagtttgattccagggtctccgctcctaaacacgaacctacactactctgatgtgaggttgttgtcatagaccggtgtggtgatgcatgcctgcacacaggagtcagaaaaacaaaggttgaggctgggtgcggcggctcacaccggtcatcccagcactttgggaggccaaggtgggaggatcgcttgagcccaggaaggcgaggctgcagtgagctatgatcactgtacactagcctgggtgacagagtgagaccttgtctcaaaaaaagacagagagagaaagcaaaagaaaggaagtaaggaagataaaaatataagctgcctaataattatggcattcactcaacaagaagaaaaagaaagaaagaggaaggaagggagggagggaggaaggaaggaaggaaatatataagctgcctgataactgtaacattcactcagcaatattttctcttaattttcacttaagcaactattatgtgtctgtctgtattctttttttgttgtttcatttgttttgttttgttttgttttgttttgagacggagtctcgctctgtcacccaggctggagtgcaatggcatatatatatatatatatatatatatatatatatatatatatatatatatatatatatattttttttttttttttttttttttttttttttgggaaacagaatctcactctgttgcccaggctggagtgcagtggcatgatcccagctcactgcaacctccacctcctgggttcaagcgattctcctgcctcagcctcccgagtagctgggactacaggcatgcaccaccatgcccagttaattttgtatgtttagtagagacagggtttcaccatgttagccaggctgatctcgaactcctgacctcaggtgatccgtccacctcggcctcccaaagtgctggcattacaggcgtgagccaccgtgcccgaccaggaattaaaaatagacaaccaccaccaagataaaaaaaggtatacttcacataccagatagtgaggagggccactttgactagggtggtgggggatatacttagcgagaagagagtatttgagtctgaccctgaaagaagtaatgaggcagccaggctggtccattctagtagcagagaggaggccagtgatgctgtggaggggagtgaggcagggaagaggggagggaggcaggatttataacgcggaatagaccacagtgcagctggccaggaattagggtggcgtgagtgaggcactctcctgggatgtaaaatttaattattcccaaacaattaacatatttgaaaaaattattgaaaatttgaagagtaggtcgttaaaactcacattattctgtttgaatactttattcccctgaaagatttattagaattttacattctaggcttttgtggatgcaagcgcatcagtgctatttccaaaacctacttctagaaaataaccatttaaaagtgcactaactgggtgcacctatagtcccagctactagggaggaccacttgagcccagggatttgaggctaaagtgagctatgatcatgcctgtgaatacagcgagtgtactaaagcctgggcaacatagtaagacctcttctctttttttttttttcccaagacggagtcttgctctgtcgcccaggctggactgcagtggtgcaatctcggctcaccgcctcccaggtttaagcgattctcctgcctcagcctccggagtagctgggattacaggagtgcgccaccgcgcccagctaattattattattttttttagtagagacggggtttcaccatgttggccaggctggtctcaaactcctgaccttaagtgatccacccacctcagcctcccaaagtactgggattacaggcgtgagccgccgcgcccggcccaacctcttctcttaaaaaaaataaataaataagaaaagaaattagaatatttgcaccaatcaagagtctaaggagacataaatactaaatgcactgtggggccctggacggggtctgggaacagaaataggatattagtggaaagactggtgaaattcaaatagcctggagtttacttgatataatatagttgtgtctatggttagttttttgtttgttttttgatacagggtctcactctgtcacccaggctggagtgcagtggcgtgatcacagctccctgcagcctcggcctccctggctcaagcgatcctcctgcctcagcctcctgagtagctgggactataggtgtatgccaccatgccccactaatttttaattttgtttaaagatgaggtctcactatgttgcccaggctggtcttgaactcctgagctcaagcaatcctcccgcctcagcctcccaaagtgctgggattacaggtgtaaaccactgggaccagtgctacgtttattttttggttgtaacaaatgtaagatgttaacatgaggggatcctgggtgaaatatttccattaatattatctttggaacttttctgtcagtctaaaaattactccaaaacaaagttttaaaaagaatcccgagccaagcacggtggcccgtgaccgtagtccctgctactcatgaggctgaggcaggaggattgctcaaggcaaggagctccaggctgcagtgagctatgactgctcctatgaacagccactgcactccggcctgggcagtgtagcaagaccccatcgctaatttttttaagtgcattaaaacacagataaagggttgcctgtttttcgttttggcacagactctggtatgacttgacacaggcactggctgattctgcctttatttgaaattctggtttttttcattgtggatgtttttgcaatttattttgatttttttaaaaattgcatgaaaatgttattcacagccagatgcagtggctcacgcctgaaatcccaacactttgggaagccaaggtggaaggatagcttgagcccacaggagttcgagaccagcctgagcaacatagcgagaccctatctctctctcttttgtattttaatgccttttgtgaaaactgtcaagagaccccatctctataaaaacataaaaaatgagctgggcgtggtggtgcacacctgtaatcctagctacttggagggctgaggcgggagaatcgcttgagccctggaggtggaggctgcagtgagccaagatcgcgccactgctctccaccctgggtgacgcagcaagaccctgtgtccaaaaaacaaaatattattcacattgatccataaatgtcgtggcaccaccacccgctaggccagtgcctcgtttgcctcaccctaatccctgccctcaatgtcccccgtatttgtgtcctgaacggaggaccacgcagtcccaggctccgatcccccttcctttacccgtggcaacgagctccagctggtcgctgggcagggaccagaggcttccgttctggtaggagcagcggtagcgtccagccagacttctcttcatggccgggatgaagaggactgcctgatcctggtacctgctggaactcagcttctccaggcggtacaggtccacgcccggaggtccctggcaccggagggtcactggcttctccaggggcaccagggagctgggcagagcctggagggagggcttggggagcggtcctggaagaggagcagggctgggtcagcctccccgcagaccccgcctggaccccgctgctcccgcgctggcggatcccgcaggagggaaggggtctggggaaggactcaccactctgcgctggcacacgccccagacacagccctgaggaaagaagaaagggaccagatgccaggactcgcttttatggacattcctgcctgctgggcgcggtgataagacatttgcatgcatatgctttactctgtcctaataatttcttcaaaagacacacaggaatgtaatttaagtgagagaaaccggtcagaaaaagccacatagtttatgaggtcatttacatgaaatatccagaataggtaaatctataggagatggagaagaaagcagatccatggctgggggtggtgggagaggagggcaaggcatggtggcgtactgctctctgtggacttgttcgtgttagacacggtgggctcgttcgtgttagacacggtggactcgttcgtgttagacacggtgggctcgttcgtgttagacacggtgggctcgttcgtgttagacacggtggactcgttcgtgttgtgttagacacggtggactcgttcgtgttagacgcggtggactcgttcgtgttagacacggtggactcgttcgtgttgtgttagacacggtggactcgttcgtgttgtgttagacacggtggactcgttcgtgttagacacggtgggttcgttcgtgttagacacggtgggttcgttcgtgttagacgcggtgggttcgttcgtgttagacgcggtggactccttcgtgttgtgttagacacggtggactcgttcgtgttagacacggtggactcgttcgtgttagacacggtggactcgttcgtgttagacacggtggactcgttcgtgttgtgttagacacggtggactcgttcgtgttgtgttagacacggtgggctcgttcgtgttgtgttagacacggtggactcgttcgtgttgtgttagacacggtgggctcgttcgtgttagacgcggtgggctcgttcgtgttagacgcggtgggctcgttcgtgttgtgttagacacggtgggctcgttcgtgttgtgttagacacggtgggctcgtttgtgttgtgttagacacggtgggctcgttcgtgttagacattgcccattgacttcctcagtggatgtgaggaatgggacctgagacattgctgtcccttcgtttcctcccttcagtctcccaatattaaataatatccaagtacattacaatagtatgcaattgtatagacaagtattgtaaatactattgcatattgtatattattgtattttattgtctatgtaatatatgcgataaaaccccacactaatgggatgcattgggctccaaggatggagcaggatggagcctcagcgtgtaagtcaggacgtctcagcatgtgctggccatgggtttcccggtatttacaacatttgcttgaatcagtattccatgattacatgataggatataatatatataataatcgtttcaaatagcctgaaggaggatggggaaagttcccaacacagaaaggatgcatgtttgagaagatgggtgtgctacttaccctgatctgattactatatgtatatacacatatagtgcatatatgtaaacctacatctatacatacatgtgtatgtacatatacacgtgtgtacatacacacgtgtatatgtatgtatatgtatatatgtatgcatgtgtgtgtgtgtgtgtgtgtgtgtgtatacatatgtatacaaatacatgtacataagcgatcccctcctggaattgcttgagcccaggaggtcaagtctgctgtgaggtaagattgcaccactggccgggcacggtggctcatgcctataatcccagcactttgggaggccagggtgggcggatcacaaggtcaggagttcaagaccagcctggtcaacatggtgaaacaccatctctactaaaaataccagaaattagctgggcatggtggcacgtgcctgtaatcctagctactggggaggctgagtcaggagaatcacttgaacccgggaggcggaggttgcagtgagccaagatcacgccactacactccagcctgggcaacagagcaagactccatctcgaggaaaaaaaaaaatgatattgccccattgcactccagactgacaacagagcaagaccctgtctcagaaaacgaagaggaggaggaaaaaaaaagtactaattatctgaaattccaatttaaccaggcatccagtgttttatctggtaaccctcattcttacacacacacacacacacacacacacacaaaggcgggatagttgtcattcccactgtaaacataaggaaactgggcagaggccaagcaaccttgtgtagctcacatagcaagaagtgggtgaacccagctcatgtcttgactctgagctcagagagtgacaacttgtcaccagcgcccccatagccaccaccctttgtccaccccaggctccctctgcaccccaacgcaagctccggccgcttctctgtccccctcctcctgccgcatcacagcccacctcagcctctttgtaggtttccatgcgacgctgtaccatggctgggagtcttccaggcgccgtgctgagcgccttctgtgcatggactccaagtcgccataatcgtacgggttacccaccattatcagtcccctcttatacatcaggctagtgagacagtatcttatccacagtcctacagctggcaggagtagattcaaaccctagcagcaccaattagtggtaaagagtgtggacttgggaacttacaggagtagagagcacagtggtggttaccggggcggtggggtaaggtttggggagatgttggtcagaggaggacagtttcagttggacaagaggagtatgtcttggagatctactgcacatcatggtgactgtagttaataacaacatattgtacacttgcatatcaccgatagtagattttaaatgttctcaccggccgggcgcgctggctcacacctgtaatcccattttgggaggccaaggtgggcggatcacctgaagtcaggagttcgagagcagcctgaccaacatggtgaaaccctgtctctactaaaaatacaaaaattagcggggcgtagtggcaggagcctgtaatcccagctacttgggaggctgaggcaggagaatcgcttgaacctgggaggtggaggttgcagtgagccaacgtcatgccactgcgctccagtctgggcaacagagtgagactccatgtcaaaaaataaaaataaataaaaataaatgagcgtggaatactactcagccattaaaaggagtgaaataatgtcttttggccaggcacagtggctcacatctgtaatgccagcactctgggaggccgaggtgggtggatcacgaggtcaagagatcaagaccatcctgcccaacatggtgaaaccccatctctactaaaaatacaaaaattagccgggcatggtggcgggtgcctgtagtcccagctactcgggaggctgaggcaggagaatcacttaaacccgggaggtggagtttgcagtaagccgagatcacaccactgcactccagccttggtgagagagcgagattccgtctttaaaaaaaaaaaaaaaaagtcttttgcagcaacttggatggagctggaaggcattattctaagtaaagtaatacaggagtggaaaacaaaaatctgtatattctcacttataagtgagagctaagctgtgggtatgcaaaggcatgcagagtgatgtaatggacttcagagactcagaagggaagggcagaagtggggcagggatgaaaaactacacattaggtacaaggtacactagtcaggtgacaggtgcactaaaatctcagaattcaccagaatataattcatccatgtaaccaagaaccacttgtatcccaaaagctactgaagcaacaagccagatgcagtaacctgtacaggccacacctgtaaccccaacactttgggaggccgaggtgggtggatcgcttgagcccaggagttcaagaccagcctgggcaacatagcggacccccgtaactaaaaaaattacaaaaacaagccaggcatgatggtgtacaactgtagttccagatactcaggaggctgatggggaggcactggttgagcctgggaggttgaggctgcagtgagccatgatcatgccactgccctcctgcctgggtgacagaag[155 bp omitted]cccctactaaaaatacaataattagccagacctggtggcagatgcctgtaatcccaactattcgggaggctgaggcaggagaatcacttggacccgggaggcagagtttgcagtgagctgagatcatgccattgcattccagcctgagcgaccgactgagcgagactccatctcaaaaaacaaacaaaaagaaaaaaagaatacatccatggatggataatgaatgagaggttgtttatattcacagttaaccctctcatctccagtaatgcaaccatcttcttcctgcttagccttttggagatgctgtccctttagtggtcaaattctgaagaaatcaggaaataatgcattcgacatgcccagcacaagtgaagatcaggcagcagaaatgcattcgacctgccacccatccatcaggagactatttactccactactgtaggggatactgacaaattaaatccatacctagtccagatatcaattccacaatttttttttttttttttttgagacggagtttcgctcttgttgcccaggccagagtgcaatggtgtgatcttggctcaccgcaacctccacctcccaggttcaagcgattctcctgccttagcctccagagtagctgggattacaggcatgtgccaccacacccggctaattttgtatttttagtagagatggggtttctccatgttggtcaggctggtctcaaactcccgacctcagatggcccacccgcctcggcctcccaaagtgtgtaagccatggcactcagcctttttttttttttttttttttttttttgagatggaggctctctctgttgcccaggctggagtgcaatgcctgacctcagctcactgcaacttctgcctcccagtttcaagcaattctcccacctcagcctcccacgtagctgggattacaagcacccgccatcacgcccggctaatttttgtagagatggggtttcaccatgttgaccaggctggtcttgaactcctgacctcaggtgatccacccacctcggcctcccaaggttgagattacaggcgtgagccactgtgcctggcccacattttttaaaaaaggggcaactgcagtgtagtagaacaaagttgtgaccaatgctaggatactctgttcatttcctgacccagccatgaatacactggaataactcatgcaaaatgccagctcgctggccccccgtttccccacccaacaaatgaaggggctcttacaggttcctttttgtcctgaaattcatcaccaatgcaaatttcttaaaaatcctttgtctggcagtccatgcctgtccttcagcatttcccagatctgaccctcaggactcaccaagacagaagagggcggtcggggatggagacatggttcctcagccctgtcctgagctctgtggccagggagggaagtggtgggagcctggggcacaggctcaggatgtgatgaggatgaagaatgctctcctcccttcctccaccagccccggcctttcctaattgagactcatcgagccgtagccggctcctcagtacagtgacttgcacacaagctccaaggagccgcgcttatctcctctggccagcctggcgttgcaccgtttgtccgcctgctggggcctggtctgtgttcccgtgctcccataaactccctgatgtcactaggaaaatacgcatcaaaaccacagtgagatatgacttcacaccttctggaatggctgtattttttttttttcttttgagacaaagtctcgttctttttgcccaggttggagtgcagtggcgccatctcggcccactacaacctccacctcccaggttcaagcgattctcctgcctcagcctcccaagtggctgggattataggtatgtaccacaccaggctaatttttgtatttttagtagagatggggtttcactgtgttggccaggctggtcttgaactcctgacctcagttgatccacctgcctcggtctcccaaagtgctgggattacaggcatgagccactgcacccgaccggctataattttttttaatggaaaacagcagatattggtgagtatgcagagaaattgaactgcgcgtgcattgctggcagggacgtaacatggcgcccctgctgtggaaaacagttccagcagctcctccagaagttaaacgtgggattgccataaaatccagcaattccacttcggggtacacacctaaaagaactgaaaacagggtctctaacatatttgtacacagtgttcatagcagctttattcacaatagccaaaaggtgaaaccacccacatgtccatcaacaacaatggataaacaacatgtggtatatacacaca[145 bp omitted]accccatctctactaaaaatacaaaaattagctgggcgttaaattagccgggcatggtggcaggtgcctgtaatcccagctacttgggagacggaggcatgagaatcgcttgaacctgggaggcagagattgcggtaagccgagatcgcaccactgcactccagcctgggcggcagagtgagactgtctcaaaaataaaaataaggccgggcgtggtggcccatgcctgtaatcctagtactttaggaggctgaggcaggcagattgcctgagctcagcagttcaagaccagcctgggcaacacagtaaaacccccaaaaaatacaaaaaaaaaatagccgggcatggcggcaggcacctgtagtcccagctactccggaggctgagacaggagaatggcttgaacccgggacgcggaagttgcggtgagccgagatcgcgccattgcactccagcctgggtgacagagcgagattctgtctccaaaaaataaaaaatattataaaagaataaattcagatacatgctacaacgtgatggaccttgaagacattatgctaaaggaaatattccggacttgacagataaatactgcattgtgccgcttatctgaggtatcgagaggagtcaaattcatagagacagggattagaatggtggttgccaaggcctgggaaaagtggggagttactatttaatagggagcgcttaggttgaagatgatgacaaagtctgggggatccatagtggtgatggttacacaacactgtaaatgtatttatatttaatgccattgactgttttttgttttttggttttttgagacggagtctcactctgtcgccgaggctggagtgcagtggcgcgatcttggctcaccgcaacctccgcctcccaggttcaagcgattctcctgcctc[134 bp omitted]aagtgctgggaatacaggcatgagccaccgcgcccggccagtgccgttgacttgtatgtgcacttacaggtggttaaaatgagaactatcagggtgttgatatctaaaaacctccctgccatcatcttccctacatctctcattcagtgaccatggttgaatgcctgccacctttcaaatattatgtcaggcactcagtattggcagttttatccattataaatgctttaagctgcatagaattttaaacgtgttaataaaagtagttataaatctttaatacataagctggctttaaaattattggtaaaataagattagaaatgtcttaagaattgttggcgtttttgtttgcacttattgaacgagtggtttcatgcttatccctgcagaatactatgagatttgtcataagggttataaaactataaacccggctgggcgtggtggctcacgcctgtaatcccaacactctgggaggccgaggcaggcagatcacctgaggtcgggagtttgagaccagcctgaccaacatggagaaacgccatctctactaaaaatacaaaattagctgggtgtggtggcgcatgcctgtaatcccagatactcaggaggctgaggcaggagaatcgcttgaacccgggaggcagaagttgcagtgagccgagattgcgccactgcactccagcctgggcaacaagagtgaaactccatctaaaataaataaaaataaaacatttgttttttgtagagttggggtttcactatgttgcccaggctggtcttgaactcctcctgggctcaagcaatccaccgacctcagcctcccaaagtgctgggattacaagtgtgagccactgtgcctggccctattgggtccttttaaaagatacataaaaaatcaaatgcaacagtgaagtcaatcacccgatggcagaaattggggtgctcctggcatgtggtcggtcgaagccaaggacactgctcagcattctgcagtgcacaggacggccccgcccaggcggagaatgatccggtgacacatataggtgggaaggatgcacgaatgatggcgtttaggaagaatattatcacttctttcccgtaagagcaacttagagcaagaaaatggtattattcttagggccttctctcttatggaggctccaagccagggttgccatggcagaagatgctgggcttgctttttccttgagagaactgtactcaagatgatgtaactgtcaccccgggtgccacttgggtgctttggagaagcgctcagacgcgacacgccgtgacgactccgcggcaggcagccggacctgtcctctggcgtgcggttcacgggctgtgtttatccccctggttccttcacagccaccttgggaaatacgttgcctctgaatcacgccaggcaggctctcactgtgtgtgctgcggggctggaaatcagggtgacactccgctaccgaacagcctgactaggaagccagaaagacgctgccggctttagtttgtcctttgactttccttgatatgaatgaagatagagcacttccacactgcacaacaggaaaagcccagaacgcttcctggagatagcgagggggtgatgcagcggacagctatggctgatgaccccctcacctctgactccccctccctccctgctttctgaacgcacatccatcaccaaccataggttcctgtttggggtttgctggctggaaaaaaaaaaaaaaaaaaaaggaaagctggctttctagtaaaaaccacttcctttgctcatttatcaaactcaaacgctaggagggccacctaacatcctccgtcccacgcaatggggtgtttctggagcactccggtttatcagggaccctgtcagttgccatcgcacatgtatatggggccagcccctgtgccaccgaagaggggggatattgaaaacatgttacagccaggagcggtgcccccttggttcaagcagttcttctgcctcagcctccctaatagctgggattacaggcgtgcaccatcacgcctggccactgttatgtagtttttaccacaatttaaaaaaggaaagagtgcctgggtgagtcctacgcacctattcggagaaccaaaggctttgaggttatcctcggcccacccatctgatgggagtgtttctcaaacttgcttttccgtgatctcccagtaagaaatacctactacacacacacagtctccggtcggcatgcttagggtagtcttccaattccccctcctggtatttacaccctggagtggtccgctcctcttgggctgaacctgtaacttgctcccaagcaagagcacacagcaagctcacgcacgtggttgttggtgtgattctgtttctccagattgtctccattcctccctggcttctccacagggccgctcaccatggcagccggctccatcaccaccagccagcgagagggcaagacaagagggctgacgagggacgctaccatcacagaggtcagttttgtaacctaaccacaagactaacctactgtcacttctgccctatcctactgctagaagccagtcgctacatctcccccacactcaaagggaggtggtcgcaccgtggggtccactggaagttgcctaccagactcaggtcatcccaaacacaccctctagccatttggtgtggcatcggaaagaaaactaaggccaggtacggtggctcatgcctgtaatcccaacaatttgggaggccatggcggaagggtcacttgagcccaggagtttgagaccagcctgggcaacatagcaaatgttatgttgccacctctacaaataattagccaagtgtggtggcatgcacctgtagtcccagatactcaggaggctgaggcaggagaatcacaggtcgaggttgtagtgagctgtgacggcactgcactccagccttggcaacacagtaagacctcgtctctaaaaaagcaaaaagggctgggtgcactggctcacacctataatcccagcactttgggaggccaagacgggtggatcacctgaggtcaggagttcaagataagcctggccaacatggtgataccgtctttaattagccaggtgtggtggtgggcgcctgtaatcccagctactcgggaggctgaggcatgagaatcgcttgaacatgggagacacaggttgcagtgagctgagatcatgccattgcactccagcctgggcaacagagcgagactaggtggctgttctgtgtactgtgggatattgagtagcatccctggcctccccagtatctcaaatatgaaaacatgttttctatctcgattactgagcttttcggtgcctccttcggttctgcacctaagctaagagccccttcatctcaccctgatctctatccagtttctaacacagcagtcttgtaagatgcccggacttaaacggttatttcctgtgaaacaggtgaaaggggctttcatctctaaaaagtcggaacttttttttttttttgagacggaatcttgctctgtcacccaggctggagggcagtggcatgatctcggctcactgcaatctccgcctcccagcttcacaccattctcctgcctcagcctcccgagtagctgggactacaggcgcccaccacca[141 bp omitted]ctgatgccttgtttcctaaaaggaataaagccatgagttgcctttgttcagctcatgggcattcacccatgcacagaggaaaaataaaatctacgactcgggtacattttcttcttttttttttcttttaaatgagcaagtttgagagtctgcagtttggactaccatgagaattgataggaaggtgggagtcccaggcaatcccaggtcctgtagcagcagctggtggggttcccactccatgccgtgcagagcctgaactcaggatgacacctgcacctgctctctggctgggctctggcacaggaagccctcagcaaacacccccggcacagccatgccatagccagacaacagctcgctgtaccacaccatcatgggagacagcagttattctgagcatctcactgctgaagaaaccaaggctcagagaggaccatgcatgcacaaggtcccacagggacccaagaatccaccaagtgtcagacaacttgcccatgctcttcacggagcaccttggaaccctccccgacaggcaccgctggctctcctgacgtggcctgcaagtgcacggagccccttcctcctcggccattcccagtttagattcccaggggaagcatcagatggcccctctcccctgctggcagcagagcagacggaaccagccagagcccagggcagtgctcacctgcaggccagtccactgcggccagcaccgccccctagaacctactgcgggcatggcggccgccagtcctgggtctcccggctcaggtagtgccaggaagctgcgggcatggcggacagctgtcctcggtctggaggcgccatcctggctttcaaatctgctccagaggttatctggggaggggctgctccctcacagagggagcctctaagcccaccaggcgggcactttcagcccaaagcctccgggccacctcctcatcctcagcctcgggggccggggccttctgtttgagtccatcgaagtactttccggaaacatccgccagttcctccgccacggccaggtatgtgctgggctgggcggccagctcggggctcttgaccagcagccagaagatgggccctgcaatcagcccacagggcatttagtccacactcgctcagagagaaggaaggaagccccgctccccggtcagggagctccgggtccctggagtcccacagagccctcctctagccctttccccttggctgcctccatctgcagttcccttccctggcactgcccaggcaaatcccaccagaccagggatcagaccaaaagctgcctcccccaaggagccttcctggctttgtccaggaaaatggaagctctcttcctcttggtcagccccagtcctcaccctaccccatttctcctttaataacatcttattaaatgcacctg[136 bp omitted]accccatttctactaaaaatacaaaaattaactgggtgtggtggcgggtgcctgtaatcccagctgctcgggaggctggggcaggagaatcccttgaacctgggaggcggaggttgcagtgagctaagatcacaccattgcactccagcctgggtgacaat[132 bp omitted]cgtgtgaaaccctgtctcaactaaaaataaaaacttagctgggtgtggtggtgggcgcctgcaatctcagctactttgggaggctgagacaggagaatcacttgaaccgaggaggcagaggttggagtgagccaagattgtgccactgcactccagcctgggtgacgagcaaaactccgtctcaaaaaaaaaaagacatttatttatttatttattgagacctggtgtcttgctctgtcacccaggctggagtgcagtggtgtgatctcagctcactgcaacctctgcctcccgggttcaagcgattctcctgcctc[134 bp omitted]cagcctcccaaagtgctgggattacaggcgtggctattagcctcgccaagttaagattcttgatgccaaccaatcacccactccatgtttttcaggattataaacactagtcataaagcatgaactgcctgggggtggtggctcacacctgtaatcccagcactttgggaggcagttggatcacctgaggtcaggagtttgagactagcctgaccaatatggtgaaaccccacctctagctgggtgtggtggtgtgcacctgtaatcccagctacttggagacaggagaatcgcttgaacctgggaggtggaagttgcagtgagtggagatcatgccattgtactccagcctgggcgacagagcaagacttcatctcaaaaataagtaagtaaagctccaactgtttgttccacctattctctgggcggggtcctgtgctggccctttcaaggaaggtctcgtataacccccccagtgactgtgaggtgagtcctattaaggcctgcactctgcagatgaagaaacaggctcagaggggtaacagctcttccccaggaggtgcagctggtttggggtgaagctggagttaccctgagtacagcctgactccaggcgtcagctccacggcctcttcctctgagacacggttttctcatccgccagcagggctctgcctgcttcccggggctgttagaggctggcaggccaggtcaacggaggaaagggacctgtgctctgtgcctcagaagacgtaggcgaggagcaggcatgaggcctcagggacggtctctgagggagggtcctgggccctgggctgagaaagcaggggtggagggctccacgtggagaccccaggctgggaggggactcaccgagtgtggtgctggagaaggtggagccatggatgcccgtgtgtctgcccagctctgtcctggccacgccggggtgcagggcgttgacagtcacaccagagcctggggaagaaagaaagagaagactgagggaggggtccagcctcacctgggaggctgtggcagcccacacccagctgtggggcttccgggcaccaggctgcttcctgcactcaaaccccatcgtccctcttgctctggaatcttagtgaagtggtcttatcttgcggagcggctctgccacatggctgctgggagccgagctttcctggagggcttcataaacccagaacgctgagcttaccccgggagcctgcatcggtgcgtggcggtgggacctaagatactgtaactctgaccagctcccagtggggctggcaccgctggtccacagaccgtctttcagaagcaaaggcctagcacagatttctcaatctcagcactgtggatgctgtgggttgggaggagtgaggggccatcccgtgcgctgtaggacattgagagcatctgggcctttaccctccagatgcccagagcaatctctccccaagccagctgtgatcactgtgtttccaggcattgacaactgcgggtcaaaactgcccctggttgagactcactggctggagccaaaaggctgagctgcctgcccaacagcagcagggaaggacatctgatccaggcagactagaccacctgggatgaacagacaatcctcagaagaacgatcgattagtgatgtctgcttcaggcaccagaagcgggcagcgtggtccacatgctctacttttgctgactctgttctggatccaccgtttggcctcccatcagcctaggatcatggaaaggccgctctaggctcagagtaaagcaagagggaggccgagcctagcgcccccgtaccttgcagccgccggctcagctccttggtgaagaggacgatggcgagcttgctctggcagtaggcggctttggtgttatacttcctcgtctgccagttcaagtcgtcaaagtctatgtgcccagcaacatgggccagggacgagaggttgatgatccgcgaaggggctgaggctttcagcttgtccagcagcaagtttgtcaagagaaagtgacctggattaaggatgatgaaaaggtcacttttgactcacacctaaaatcccagcactttgggaggacgacgggggaggatcgcttgaacccatggtgcagcccctgcccaggcctcacccaggtggttaacgccaaactgcatctcgaagccgtcctcggtggtccagtgggggcaccgcatcacacccgcgttgttgattagaatgtccactcgctcctcctctggaagagaggggtggaggaggagacatcccggtgaggacagaccccagcctgatgcaccagcagaaacactcctgtgctcccacaacctgtgaatgtggcctgtgccggaaacagggtctgtgccgaagtggccatgtcaggatgcggtcattagggtgagccctaatccaatgactggtgtccttataggaagggaaaacagagacagagacacatggggagaaggccatgtgtggacagaggcaaagaccggagaggcacagctccaaggtgagggtgggccgcccccgctggaagtggaagaggctgggaggattatggcccgtctcacaggtcacagccacagggacaccgcgattcagactgccggcttccggaaccgtgagggaatgcacgtctgagggtgtaagccactgggtttgcagtacattgttacagcagctccaggacactcacacgccctccgcacctccatctaagccttgggactccttcctgccggagccccgaggccaaaaacgggaggttaccggtgggagccccggcaccgcaggcgtggtttcattcccaaacctgccacctcactcatacaagcaaccaaaggacacacagatggagactgcagcctcagtttcctcagctgtaaaatgcgctgaaccacagggccttcctccctgtaccactcagctcgggttccgtaac[141 bp omitted]agaaaccgcgtctttactaaaaatacaaaattagccaggcgtggtggcatgcacctgtaatcccagctactcaggaggctgaggcgggaaaatcgcttgaaaccaggaggcagagggtgcagtgagccgagatcgcatcattacactccatcctgggcaataaaagcaaaactccatctcaaaaaaaaaaaaaaaaatcacagtcccagaggctggaagtcccagatcaaggtgtgggcagggctggttccctctcagggccctcagggaggatccgctctggtctctctccttggctcacaggtgaccatctcctctctccctcttcccttcctcttccctttggagctgtctcttttttttttttcatttttccttttttaattttagatttttcagacatggtctcactatgttgcccaggctggtctcaaactcttgaactcaagcaatcctcctgctttggcctcccagagtgctgcaatttcactgcccccagcctatttttttttttttgggggggggagatggagtttcactcttgtcacccaggctggagtgcaatggtgcgatcttggctcactgcaacctctgcctcccaggttcaaacaattctcctgcctcagcctcccaagtagctggactacaggcatccaccaccacaccgggttaattttttgtatctttagtagagacggggcttcaccatgttggccaggctagtctcacactcctgacctcgtgatccacctacctcagcctcccaaagtgctgggactgcaggcgtgagccaccacactcagtctacttggcctattttttatatttctttgagacagggtctccctctgacacctgggctggagtacagtggcgcaatcactgctcactgcagcctcaacctcccaggctcaagcagtcttcttgctcagcctcccaagtagctggggccacaggcatgcgccaccatgcccagctagcacgtctgtttctgtgcgcaaatctccccttttcataaggacaccagtcactggattagggcccaccctaatgacctcattttcacttcaggacctctgtaaacacccacctctaaatgaagtcacatgctgagggatgggggttcaggatcccaacctatccttgggggtggaggacacaatggaattcataatgctcccgaagtggttttcggcggggatcgtgaattaggtgtccagcgcgtaacacacagacaccatctggttctctgtgtgagaaggagggggttgcagcacacccgtcatgaataccagctctggagcaggacagacaggttcaaagcctggctccaccccgaccagctgcatgatcctggccaagtcacatcacttctctgtgactcagtttactccttgtaaaaaaaaaaaaaaaaaaaggataataacatcacctgcctggtacaactgtatacttactcattcagtaagtattttctaagcacctattactgggcactggaaatacagggtggacagcacagccgaggccccgtccgtgtggaccggacattccagtgcagctgagagccacttccactcgtgagagaatctacccgtgacagagctgcgtggaagctgacaggaggcccctctcaggaggtgacgcagaaactgggaccgggaaaatgaggcagggcccacgtgcggagacccagggaagggggatgcaggcagcaggcgcagcacgggtaaggcccaaaggcgggacagggagactccactcacagctgggcgcccaggagtgccgccagcttctggtgttttgttttggttttttttctttttttttttgagatgaagtctcactctgccacccaggctggagtgcagtggtgtgatcttggcccatggcccactgcaacctctaccgcctgggttcaggcgattctgctgcctcagcctcccgagtactgggattacaggtgcccgccaccgcaccctgctaatttttgcatttttagtagagacggggtttcaccatcttggtcaggctggtcttgaattcttcacctcgtgatccacccgcctctgcctcccaaagtgcagggattacaggtgtgagccaccgcgcccagcctgtttttttttttttctttttatgagagggaagctcactcagtggcccaggctggagtgcagtggcgcgatctcagctcacagcaacctccgccgccagggctcaaacgatcctcccacctcagccttccacatagctgaaccacaggcgcccgacaccacaagcagctacttttaaaattttttgtagaaatggggtttggctatgttgcttaggctggtctcgaatttctgagcttaggcaattcgcccacctcggcctcccaaagtgctgggattgcaggcgtgggccacagtgcctggcctgttgttttgtttatctgggaactgcctcaactttttttttttttttttttttttggacacagggtctcaccccgag[134 bp omitted]tacctaaaacaaaaaagtagccgggcatggtggcaggtgcctgtaatcccagctactcaggaggctgaggcaggagaattatttgaaaccaggagatggaggttgcagcctgaccaacaggaagaaaccccgtctctactaaaaatacaaaattagccgggcgtggtggcgcatgcctgtaatcccagctactcgggaggctgaggcaggagaatcacttgaacccaggaggtggaggatgccgtgagccaagatcccgtcattgcaccagcctgggcaacaagagcaaaactccgtcttaaaaaaaaaaaaaaaaaatccctcactgcagcctcaacctcccaggctcaagcaatcctcccacctccacctcccaagtagttgggactacaagtgcacaccatcacgcctgcctcattgttttttattttttttttgagatggagtctcactctgtcacccaggctggagtgcagtggcgccatctcggctcactgcaagctccacctcccgggttcacgccattctcctgcctcagcctcccaagtagctgggttacaggtgcccgccaccacgcccggctaatttttttgtgtttcttagtagacacggggtttcaccg[134 bp omitted]atgttgcccaggctgatctcaaactccctgataaacaaggctgtgggtacctgcttcctggggctctttgctttgtgttctttctagtcgggagctgggaagagccacagcttccagctttgtcagagtgtcatctcacaaactgatcttcccaaaacttctgtctcccaaagtgccgggatgacaggcgtgaaccgctgcacctggcctgccccagtgtggtagaatacacaccacataaaatggacgatcttcactatttttaaatccactgctgtctttattcctggctgttgatcttaggaaaacaccaagaagctggtacttgatttgctaaaaaagtca[175 bp omitted]ggtggcaggcgcctgtagtcccccgccactcgggaggctgaggcaggagaatggcatgaacccgggaggcggagcttggagtgagccgagatgtgccactgtcctccagcctgggcgacaaagcaagataccgtctcagaaaaaaaaaaaaacccctctagagaatcccagaaaatagaaggaattattccatttcccggaagaggaacgtgtggctaagagaggaggcatcacctgcccaggtgtgtccagccggggtcctcactgtctcagggacctcagtgctccggacacctgtgtccacaagccagagacaggatcagaggcgccctgggtgggattgcctgggacagtgtgcatgaaggtgacagtgctgtacctggtacacagcaggtgcttaataaatgttcatccacctctgagactctgaggcattgccctctcactgttctttgtgatctcaccgtagtgcctctcacctacccgacaacagtgccggctctttcttgatccccaagggcacagcaggggctcagtatgaatgaatgaatgaaccaacgaatgtgcacctgcacctgcctccctagggctgtgagtggcacaaggacagctctggttcatctcacacctccagcacctggtcaggtctgagatcacgtctgctaaataaatgaggtcccacaactcccccattccttgttcatttcctgagtacccgtttactgagcggggcacattgactctgaagaagaaagctttggccctttcagtgccagactagaaaagaaacaaagcagctgggcatggtggctcatgcctgtaatcccagcactttgggaggctg[132 bp omitted]agaatcgcttgaacccaggaggcggaggctgcagtgagccaagatcgcatcattgcactccagcctgggtgacagagcaagactccatctcaaaaaaaaggtcttgctctgtcatccaggttagagtgcagtggcacaaatacggctcactgcagccttgaactctcgggctcaagtgatcctcttgcctcagcctcctgagtagctgggactgtaggcacatgccaggatgcccggctaatttttttttttttttaatctttggtacacacaaggtctcactatgcttcctaggctggtctctaactcctgagctcaagcaatcctaagagaagagattttaaatgtggtcaccacaaaaacaggtaagtatttgaggtaatgcatatgttaattagcttgatttagccattctacaatgtatacaatgtacatcatgctgtacataatatatacaagtatacatgtcaactaaacaataaataattttagtgtattcttgagtctatttaaagatgaacaagaatagaaaagctagaggatggtcccagttttacataaaaatatataaatacacacacaaacctattataaacaagactagaaagatccataaaagtgattctcctggggctggtgcagatcaaagttgtttagttctgtcttcttttttattgagacagagtctcactctgtcacccaggctggagtgcactggcacaatctcagctcactgcaacctccgcctcctgggttcaagcaattctcctgcctcagcaccctgagtagctgagattacaggtgtgcaccaccacgcctggctaatttttgtatttttagtagagacagggtttcaccatgttggccaggctggtctcgaactcctgacctcaagggatccacctgcctcagcctcccaaagtgctgggattaacaggcgtgagccactgtgcccagccagttctgtcttctttacattgcagtattttataaatgtcccataacaaacacatatt[135 bp omitted]cctgagcaacatggtgaaaccccagctctaaaaacaaaacaaaacaataaaacaataattagctgtgtgtggtggcgtatgcctgtactcccagctacttgggaggctgaagtgggaggatcccttgagcccagcaggttgagactgcagtgagccatgactgcaccactgcactctagcctgggtgacagagatggatcctgtctcaaacaaactaattattcaggtagggcacggtggctcacacctgtaatcccagcactttgggaggccaagggaagcagatcacctgaggtcaggagttcgagaccagcctgaccaacatggtgaaaccctgtctctacctaaaacacaaaaaattagccaggcacggtggcgggtgcctgtaatcccagctactcaggaggctgaagcaggagaatcatttgaaatcgggagacggaggttgcagtgaggcaagatcacaccactgcactccagcctgggcaacagagcgagaccccatctgtctcaaaacaaacaaacaaaacaaagtcagccgggcgcagtggcccacgcctgtaatcccagcactctgggaggct[135 bp omitted]aggtccgcgcttgaacccaggaggcagaggttacagtgagccgagatcgcgccattgcactcagcctggccgacagagtgagactccctctcaaaataacagtagtaataaataaataaagtcgttgcttgcaggctgtacaaaaaaaggcagcaactggacttggcccctaactcatagtttgccaaaactctgctctaaagtttgcttgcttcattcacttctcagagcctggccctgggagccgcctatcccagtcctcatcccacatggccagcgttctcctaccttcaatgatctttgctgcaaactctcggatagacttgagggaagccaagtccaggtgccgggcgttgacatggtgattgagggtctccccgcggatgtcctttgctgccgcctcacacttctccatgtctcggcaggccaggatgatgttgcctcctgaaaacccaggatggaaaaagatttaaattaataatccactcctgggtactgaccccagagacatgaaaacatacgtctacacaaaaacacatccaccaatgttcactgcggcattcttcacaaaagccaaaaggtagaaacaaccaaatgcccatctgtggatgaagggacaacaaaatgtggtccatccatagagatggaatattagacggccgtgaaaaggagtgaagcactggctcatgctacagcaaggatgaccgtcagaaacactgtgctcggggaaagaaaccagacacgaaagaccacacagcgtacaatcccatttacatgaattctatgtatatgatttcacacctatgaaacgcccagaataggcaaatccatagagaaagaaaatagattcttggttttctagggcagggggtggggagagggaattacagcttgatagttacagtgagcaggtttctttctagggtaacagatgttctaagattgattttaaagatggttgcatcattctgtgactatactaaacatcactgaattggtcgggcacggtggctcacacctgtaattccagcactttgggaggccaaggcaagaggattccccatcctctccttttttttttttttttagatggagtctcactctgtcacccaggctggagtgcggtggcgcaatctcggctcactgcaacctccacctcctgggttcaagcaattctcctgcctcagcctcccgagtagctgggattacaggcacctaccacaactagctaattttttatttttttatttttagtagagacagcggtttcaccatgttagccaagctagtcttgaacttctgacctcaggtgatccaccccgcggcctcccaaagtactgggattacaaataagccacaatgcccagcctccaattttttttgttgtggtaaaatacaaatcacttaaaatttatcatcttaacccccttttctttttgtttattattatttttttttttttgagtcagtctcactctgctgccgcggctggagtgctggcgccatcacagctcattcagccttgaactcctaggctcaagtgacctgggactataggtaccacctgtgccagcatgcctggctaactctggtagagatgggggtgttgctatggtgtccaggctggtctggaacccctggcctcaagtgatcctcctgcctcagcctccaaaagtgctggaattatagatgtgagccaccgagacccgccctcttagccatttttaagtgtccagttcattggtattaaaaacatttatggctgggccgggcatggtggctcacacctgtaatcccagcactttgggagaccaaggcaggtggatcacctgaggtcaggagttcaagaccagcctggccaacacattacaaacttagctgggtgtggtgttgcatgcctgtaatcccagctactcgggtggctgaggcaggagaattgcttgaacccgggaggcgaaggttgcagtgagccaagatcatgccactgcactccagcctgggcgacaagagcaaaactccatctcaaaaaaaaaaaaacaataataataattcctaatgttgtgcaaccattacaaccatccatctctcaaattgtttcatcttgccaaactaaacttccgtttccattaaacagtaactccccattctcccctcccctcctgacccctggcaagcaccattccaacttctctatgaatttaactgtaggtagctcctgtaagtggaatcataccgtatttgctcttctgtcgactggcttatttcacttcatggaatgtcctcaaggttcatctgtttcaatgcccttttttttgttttgctttgttttgttttgtttttgagtctcactctgtcacccaggctggagtgccgtggcgccatctctgctcactgcaacccctgcctctcaggttcaagcgattctcctgcttcagcctcccaagcagctgggactacaggtgcccaccacaactcctggctaatttttgtatttttagtagagagggggtttcaccatgttggttaggctggtctcgaactcctgacctcgtgatccgccagctttggcctcccaaagtactgattacaggcgtgcaccaccgcgcccggccagaatgcccttcctttttaaggctgaatcatatgcccctgtctatagaagccacattctgtttccctgttcatctgtggatgggtgcctgggttccttccacctccggactgtgaataatgctgcagtgagcatggatgtacagatatctctctgagagccaaagcaggggagattttacctctcctggccagttccaaggcggtctgcttcccgatgcctgtgttggcacccgtcacgatgaccgtcttcccagggatggtggccttgctggggcaagccccaccggtgacatagtccctgagggtgagaagcggcacggtcagtcctgtgggcccactctcaccccacgtgcccctgactgaatgatctcaggcaaccttgtctgagctcactcacataccccaactgaaacacagacatcatcacatcacaccaagggacctctgtcatgttctccataagtggctccacccagtgtctggcgtgtggaacgccttcagcaagtgacagtcattattttataaatgctcactgcatgagattcccggccaggtgagggggcttgcacctgtaatcccagcactttgggaggccaaagttttgggggtgggggggggcgggggcggatcacttgaggtcaggagttcgagtccagcctggcaaacatggcgagaccccgtctctacttaaaatacaaaaattagccagatgtgtagggaaaagagagattagactgttactgtgtctatatagaaaggaaagacataagagactccattttgaaaaagacctgtactttgaacaattgctttgctgagatgttgttaatttgtagctttgacccagccactttgacccaatctggagctcacaaaaacctgtgttgtatgaaatcaaggtttaagggatctagggctgtgcaggaagtgccttgttaacacaatgtttccaagcagtatacttggtaaaagtcatcgccagtctctagtctcaataaaccaggggcacgatgcactgcagaaagctgcagggacctctgcccttgaacacagagtattgtccaaggtttctccccgtgggatagtctgaaatatggcctcgtgggatgagaaagacctgaccgtcccccagcccaacacccgtaaagggtctgtgctgaggtggattggtaaaagaggaaagcctcttgcagttgagagagaggaaggccactgtctcctgcctgaccctgggaactgaatgtctcggtataaaacctgattgtacatttgttcaattctgagacaggagaaaagccgccctatggcgggaggcgagacatgtttacagcaatgctgccttgttattctttactccgctgagatgtttgggtggagagaaacatcaatctggcctacgtgcacgtccaggcatagtaccttcccttgaacttaattatgtcatagattcttttgctcacatggtttttgctgacctcattatcaccctgctctcctactacattcctttttgctgaaataatgaagataataatcagtaaaaactgagggaactcagaggccggtgccggtgcaggtccttggtatgctgagcgccggtcccctgggcccactgttgtttctctatactttgtgtcttatttcttttctcagtctctcgtcccacccaactagaaatacccacaggtgtggaggggcaggccaccccttcacaggcgtggtggtgcacacctgtaatctcagctactcagggggctgaggcacgagaattgcttgaacctggaaggcggaggttgcagtgagtcgaaatggtgccagcctgggcaacagagcgagactctgtctcaaaaaaatttaaatttaaatttaaaatgcccgctgcacgagattcccaaggctgctgtacgcattaccacagacttagtggcttaaaaccacataagtgcatcctcctccagttcggcaggtcaagagtccaaaacatgtctcactggaataaatcaaggtattggtagagtcaggttccttctggaggctctagggaagaatccacttccagctcctacagaccgccacattcctccactcttggccccgcctccatcttcaacct[148 bp omitted]tgccttagcctcctgagtggctgggattacaggcacatgccaccacacctggctaatttcttttgtatttttagtagagacagagttttaccacgttggtcaggctggtctcgaactcctgaccttgtgatccgcctgccttggcctcccaaagtgctgcgattacaggcgtgagccaccacacccaacaacctctccttctatcttccatctcccctctgactgagcctcctgctccctcttataaggaccctataagactacaaggcaggaccggcacagtgcctcacacctgtaatcccagcactttgggaggccaagacaggaggatcacttgaggtcaggagttcgagaccagccatggccaacatgctgacaccccatctctactaaaaatacaaaaattagcagggcttggtggtgcacgcctgtagagtcagctactcgggaggctgaagtgggaggaccacctgagcccagggagggtgaggctgcagtgagctgtgacagcatgactgcactccagcctgggtgacagagagaccctgtctccaaaaaaaaaaaaagactacatgataatcataagatccttcacttggccgggcacggtggctcacgcctgtaaccccagcactttgggaggccaaggtggccagatcccctttggtcgggagctcaagaccagcctgaccaacatggagaaacctcgtctctactaaaaatacaaaattagacaggcgtggtggcacatgcctgtaatcccagctactcaggaggctgaggccggacaatcgcttgaacccgggaggtggaggttgtggtgagccgaggtcgtgccattgcactccagcctgggcaacaacagcgaaactctgtctcaaaaaaaaaaaagatgcttcacttaacacatcagcgagaacctctgacacgtgaggtaatgtcgtcacaccttccgaggattaggacgtggacccctctacggagtcacgactctgcccaccacacccatgtcccacagaggctaacgctggcaacaagatagtgtccagcaacaggaggctgagcaggtaaacagcactgcacccacaggagagaagggcaccatgcaatacagtggccaccagccacagaggctaatttttaagaaagtttaaattaagtaggctgggcgaggtggctcacgtctgtaatcccagcactttggaggccgaggcaggcggatcacctgagggcaggtgtttgagaccagcctggccaacatggcaaaaccccgtctctgcgaaaaatacaaaaattagccgggcgtggtggcgcacgtgtgatctcagctcctggggacgc[137 bp omitted]aaataaagagtttaaaagtctggaaggaaagcaacatttacaagggcccaggctcgcccttccctccgagtgaccttgggccggtgacctggccggccagagcgcaggtttgccccactccgggcgggcactgcgggtcgggagctacggggcctggacccgggtgcgaggggcgggggtctccgccgccttcccggcccctgcgctgggggcccgccttgaccgcgcacgcggggctagaatgtactcacttgagcagcacggcggcgcctgctaccgtgcccagcgccgacagcggcagcaggtagcggctcatgccgggccggggacaggcgtcaggcgtcaggggtcggcgcggagcttgctgcacaccagccgcctgggtagctccgaggaagagcgcgcgacgcagccacaggcgagcggaggcgcaggcgcggctgggcccgcgtccggaactgggctgcgaggggcggggcgcgggcggagggggcggggatcctagggacgggacctatgagcatcggtcctgagcgctgtcacagctgggattggtggtttcaggagcctgtgggcgtggctagtccgggggcggggcctatggtttgttcgaatgacgtcacacttgccgcagcgtataaggcgctacgcagttctggagtgaaataggttcgaatcccaccactgtcaattccagactgtgaccctctgtgtgtctttcaactatatcagcctattccctcatctggaaatgtgtgtttaccttcttcatagacttttggagataatttgagaatttccatgcacagaaacaaggatctagtagcctgtgggtacccaagctcctggggtcctgcaggagaaggcggctgggggcctggactcctgggtctgagggaggaggggctgggggcctggactcctgggtccaagggaggaggggctgggagcatggacttctgggtccgagggaggagggccgggtgcctggactgctgagtctgagggaggaggggctgggggcctgattcattcccaaattatcagaatctcatccccatgtctggccctgcacagagatatcttccctgaactctgcctgaactacctttcttagattgagtattgcacacactcctgcacttacctgtccatgtttgtcacccccaccaaaccgggatgcacctctgggcacctgcttccccttgcactgctcacagcgagtgtatctgatcaccacctcctacccctgactgtgcctgaggtgccaggagcagacaccgctggaaacagggaagaattcaacccaatctaactaggagtaagttttcttcctcatcagatgaactgtcatcttcttatatgagccctgccataatggag[142 bp omitted]gaaaccctgtctctactaaaaatacaaaaattagctggatgtggtggcactcacctgtagtcccagctactcaggaggccgaagcaggagcatcacttgaactcgggaggtggaggttgcagtgagccgagattgccctactgcattccagcctggcgacagagtgaaattctgtcaaaaaaaaaaaaaccttaggcctgtagaccttaagctctcaccatctcaaacgtattaaaccagttacacaatgccaaatgctgtataagaggcacttggaggagtcaaattcatagagacagaaaacagagtggtggctgcagggggctggagatgagattgggaagtcacaggatttgtttttgtttgtttgtttgttttgttttgttttttgagagacagtctcactgtgtcacccaggctggagagcagtgggcgatctcagctcactgcaacctctgcctcctaggttcaagcgattctcctgcctc[134 bp omitted]cggccacccaaagtgctgggattacaggcatgagccaccgcacccggccgggaagctgttttttaatagatacagagtttgttttgcaaaataaaaaaaagacctgaaggtggacggtggtgatggttgcacaacaatgtgaatatacttaacatcactgaattgtacacttaaaatggttaagatggtacattttactttatgcatagtttaccaaactaaaaataaagaaaaattttagactgggcatggtggctcatgcctgtaatcccagcactttgggaggccaaagtggagaatagtatgagcccaggagtttgagagcggcctggacaacacggcaaaaccttatctctacaaaaaatacaaaaattagcaggtttggtggcacgcatctgcaccctcagctacttgggaggctgaggtgggaggtctgcttgagcccaggaggtcaaggctatgatgagctgtgattgtgccactgcaccccaggctgggtgacagagcaagaccccatctcaaaaataataataataaatgtttacatttaataacatgggcaattggttcagatgttcattttctcaaccttgaaaaaaaaacaacactgtttttccctgtctttttctccttttctgtaaactgaaatcctaatatcattgacttccaggacagagatcagcaaactttttctacaaacagccagatagtaaataatttcagctttgtgatccacacagtggctgttgcacctcctctgccagaggagctgggaagcagccacagatgatgtgaaaacaagtgagcacagctgtgttcccataaaactttatttataaaaataagcagtgcgccacagttcgccagctcctgtttgagagtctctctccgatgcccaggctggagcgcagtgatgcaatctcagctcactgcaacctctgcctcctgggttcaagcgattctcctgcctc[134 bp omitted]cagcctcccaaagtgctgggattacaaagcgtgagccactgcgcccagctacctgtcattgaatttggaaggatggcatgaagtcattcataacaaggacttaatccatagtaagtgccagaacattgctggctgttaatatggttattataaagagaacaatgcatgcatattcctcctctgaggatctcctacctgattcccagacacacccaagggagttagaacatctgtttggactccaggtgggctgtccacgcctttaccattttcctggttgttaacatgttcctgatcagcactgggtgctgtcccaggtgctgagaggattctcccacaatgccctttgctttccccatcagagggtttatggcacccaattctcattcacattctgtctctcctttctcgttcttctctatctctcctctctctgtctccttttctcttcctctctccctctctgtcttctctccctctctctccctctctcttcctctctctcttcctctgtcctcttttctctctctctctccctctctctcacatctctctttcccttcctttctctttcctctctcttcctctctccctctccctccttctgtcttcctctatccctctcttcctcttttttcttcctctcttcttgtctctttctctcctctctctctccctctttctctttctctctctcttcctctcccttcctcttcctctctctccttctttcttcctctctctcttcttgtgtgtgtctctctctctctgttctctctctccctctccccccaactctctttccctacacacatcttaagaggcctcagcagtgtaaggtaagtttagcgaccctgtggctgtgtagagataagcaaaggggggcaaggagctccagtggtcccagactccagccatttgagtctttgcagcccaagcactgccccagcttcttgacagccccagccatcaccaaagggcacacagataagctgcctccaccaaggcctgtgcagatggtaggtttttgagtaaaatagatatgatccttgtctgaagccactgagttttagaataatttgttatatggccatagtaactggaatgattgctgtaggtttattttattttattcatccttgctgcatgcaacacatgcatggctcagtaactagaaggaaagaagagaagaagggagggagaggcagagggtggacaggagaggatggtaggaaggaaagacaggaaaggagggtgttggtggccttgcctgcaagctgagcagacaccacgcaaacaggtgacctcccagttaagatggaggggactcagggctcaggaggggcagaaggtccccgtgtcggagagctgggcaagctttctgcaggaaatgatggggatcacggccatgtgagccggcaagatttccctcagccagggaggagactccgggctgtgggaacagcttaagcagaaggcatgggacaggaatgcatatgagagatattgtgggaggagggagggctgcctgggctggcatgcagggtatgggagggggtggaagggctgaggcgggagccatcagtaaaaggacccagagcgcggctccaatgccatggtaggaagcttggcgttgactcagagggcgctgggtaccgctgaagagtgttgagccaaggagggtcatgtcacgggcagatacatgttttagaatttcttcttttctggctgagatgtagagtatggactggagagaagcacaggggacataggaaaggtagttctagaaagaggggctgtcccaccagggaaagtcaaccaactgttccccagtatccattcctcccttccagctcatggcactaaagccactgattgattagctgggtgctatcaatctctctctcatctctctctccctctttctctccccctcatctgtgtcttttctctctctcatctctctgtctccctctttctgtccccctcctccgtgtctcctctctctctcttctctgtctcatatctctctcattgctctctccctctttctctccccctcctgtgtctccttctctctctctctttctcccccatctctctttctctcccccttcctctctttctcctctcactcttcctgtttctctctttctctttcttcctctctttctccctgtctctctcttcctcttttcctttgtctctctctctccccccaactctctctccctacacacatcttgagagacctcagcagtgtaagataagtttagctactccacggcctggcacggtagctcacgcctttaatcccagcactttgagaggccaaggcaggcagatcactggagattaggggtttgaaaccagcctggccaacatggtgaaaccctgtctctactacaagtaccaaaaaattagctgggcatggtggcacgcgcctgtagtcccagctactcggaaggctgaggcaggagaatcgcttgagcctgggaggcggaagttgcagtgagccgagaccacacctctgcactccagcctgggtgacagag[175 bp omitted]ggtggcgggtgcctgtagtcccagctactcgggaggc[137 bp omitted]agggagggagggaagggaaaggaagggaaggaaggaaggaaggaaggaaggaaggaaggaaggaaggaaggaaggggaggggaggggaggggaagggagggaagaaaggcaggccctgatgttcagggagctgagagtgaagtcaccggctccaacccaggatccaaactcaagtctgtctggggtcctatccccgtcaccaccccccgccccgacccatcccccagagacctgggaaggagccaggctcctccggtttcaggaaagggctgcacaaaccaccccgccacgatccctcccagagaacaaacagctcccggccaccggcagtctccctcctcctcctgccaggctggttcccagacccaccctccctgtgtcataagcgcctctccccgcactctcaccagggctggctgttctcagaggaacgcccaggaaaaacctacccgaacccctttcagctgggaaggggacccgcctgggcttcctcaccgccgatgagacctccctcgtcgtacacttagagctgcctgtgttttccttccttccttaagcgggctgggaactctagacactcagggatgggccagcccattagagtaagcattcggccacctctaggctgctacggtcactgctgctgtcaccatcaacgtgactgtctcacacctcacttcctccggccagccacacccctgcagatttaacccgccagcctccctaaggtttcctctgcctgaaatcctctctgcattcctggctcattctcgaaattgaggtcaaagctcagatgccgcctccttccctgaccaccctacctgaagcagccgcacctgcctgctcctagtcacgccgttccttcacctgtttcgtttcctccacagggtttaccacaatctgaaagtcttattcatgcaggtgtctacttgtttatctccccaccacacctactaggatgacaatatcacaagggctggggtttcatctgtctcctcctcctctgtatctccagcacatgaaacatgcttggcacactgtaggtgcttaagtatttgctactacatcactttgggattttgcataggacactcccaatgcttagaatgtcaatctttgcttcattgtccttggcaaactcctattcatcctttgaaaccccatccatttatcccttaaccaggaaaggcttctgtgcctcatacaaccacccataaagctggattagggctttctctggggacacccttgccctgtgccacacttccattagcgcacatatcccccatgaattgtgcacaccagcagggtctagagtacggcacacattttgtctcaggagctacgtattgaataaataaattaattactttttttgagacaaggtcttgctctgtcacccaggctggagtgcagtggtgcaatcgtggctcactgtaccttgacctcccaggttcaagcaatcctcccacctcagcctcccaagcagctaggaccacagatgcaggccactatgcctggctaatttttaattttttttttggtagggatggaatctccctatgttgcccaggctggtttcaaactcctaggctcaagggatcctcctgcctctgcttcccaaagtactgggactataggtgtgagacgccacactcagcctcattatttaatatgtaagtagctatatctctctgagacccagccccatctaatttataacctccctccttctcaagaacatgcctcagctcccattgccagggaatctgacctttctccttgtcataggatttttttttttttttgagtcagaatctcagtcagtcacccagcctggagtgcatggcgcaatggctcgctgcaacctctgcctcccgggttcaagtgattctcctgcctcagtctccctagtagctgggactacaagcgcacgccaccacacccagctacttttgtagagatggggtttcaccatgttggctaagctggtctcgaactcctgatctcaagtgatggcctcccaaaatgctgggtaacaggtgtgaggcaccacatccggctgtcataggaatttgtcagcaaatcctacagactagaggatgtgtgttgggtggtgtgggggtggggataacggaggagatggggggtgagctcttcaagccccaggggagaattctgttccgttcctgggacatcccaggtgagagggaagaaaggccagccccccaagacagctatcccagactgggacagaggcaaaccctgaccacagagccctgtcactcacccaagaacaggtgccaatgacagaatagccaggccgaggggggagagaggtgcttcggtgatggatttccctggtgacttgccaagacagggctttactgcctccgccctggactggctgagtcagactgtgcaggggtggacactttgactggtatttgggaggcatttgctgtgggttacagagagggaggggcctcctttgcggccagagaaggaggaaagaggccctgggccctgggacttgggacttgggtggaggctcgggtttcggtctcacctgctgctccagaccatggcctggagggccgcctgcgccacccccaaagcaatgagatagcccctcctccctcagacccaggagtccaggcccccagcccctcctccctcagacccaagagtccagaccccagcccctcctccctcagacccaaaggcctcggacccataccaaatgcttctatgagatagttttctccccttgttcatgaagaaatgagcccaggcccagtcagatctgcatctgtgtcacagcccagggccactgtaaccttaggctactgacttccctctctgagcctctgttttctcctgtcaatggggcaaggggtctgctccttccctcaaaccccaactcaggtacagtcaagcacagaaaatacttgtggcatgaatgtgatgagaacacagaattgcagaagccaaagaaagagaagcgtaagggccctccttccacccctacctcccccacccgctgctacacgcaccaggaccacctgctgggtagccaggagctcacagtctagccccgctggccacccctgcagcccccatccttcactcaggcagttgcagggcccagaacacccctatcttctaggattgacactggctgtcaaactcatccttcaaggtgattcctggcctgccctcctcctccaggcagcctgtcctcctcctccaggcagcctgtcctgaccctcagcagcctctcctggccttggcagagcccctcgtgtcctcccttgcagcacgcatgggaagaaaggccatcgtcctcgccattgctaacaccagccttgcgtttcctctttgccaggtactgtattgacaactctctataacctgactttatcctcccaataagctgggtgtggtgggtggctcatgcctgtcatcccagcacttcgggaggataaggcaggagtatcacatgagcccaggagttggagaccagcctgggcaacataaggagactctactatatatatgtgtatatatatttatatatagtctgagatgggaggatcaccccagtaggtcgagactgcagtgagctgtgattatgacactgcattctagcctgggccacagaactagaccttgtctcaattaagaaaaaaaatggggataataggacccattccataggatgtggtgaggattatgcatacacacacacacacacacacacacacatttatgatgtactgagaagatataagcacacaataagtatctccaaaattatcaagtggcaaagccaggattcagacccacacctgcccgaggctctctgccatcagaccacactatatctctttctctctgttccttcatccccatcaatcgaaggcaaaaatgtgccttctctgatttccaggctcactcagcatagaccgtggaggcaacatatcttgaatgaagcaacaaagcagtaatgcacatgaatgcaccaaatgccaaaagctcgtttactcaacaagtatctctccaacactttctatgtgctagacccaattctgtgtgctgcagattaagtggaggactgatcacacaaaaatctttgcccttgtgaagcttgcatttttttttttttttttttgagatggagtcttgctctgtcacccaggctggagtgcagtggagcaatcttggctcactgcaatctccacctcccgggttcacgccattctcctgcctcagc[220 bp omitted]aggctggagtgcagtggcacgatcatctcggttcactgcaacctccacctcccaggttcaagtgactctcttgccttggtctcccaagaagctgggattacaggtgtgcaccaccaactctggctaatttttttttttttagtagaaatggggttttatcatgttggtgacatggtgtgatctcggctgactgcaacctccacctccggggttcaagcaattttcttgtctcagcctcccaagaagctgggattacaggtgtacaccaccacccccggctaattttcatattttcagtagagacgtgctttcaccatgttggccaggttggtctcgaactcccaacctcaagtgatcaatccgcctcagcctcccaaagtgctgggattacaggcatgtgccaccgtgcccagcctgtgaagcttgcattctaacggaggagacacagacaaaatgaaccaggaacacagtgggtaagaaggtgaaaagttctccacacaaaaatgaagtagggagagag[131 bp omitted]gctgtctctactaaaagtacaaaattagccgggcgtggtggcgcgcgcctgtagtcccagctactcaggaggctgaggcaggagaatcacttgaacctgggggggcggaggttgcggtgagccaagattgcgccactgcactccagcctgggcaacaagagtgaaactctgtctcaaaaaaaacaaaagaagtcgagtaagggatgccgccatttgaaacagggtggtcagccagtcctctgagaaggtgacattcaggcaaagatcaaaggaggcaagaaagtgaggcatgagggtatctggtagaagagcattccaggcagaggaaacagcaagtgcaaaggccctgaggcaggaccgggtctggatgttccaagagcagcaaggaggccagtgtgctgacacacagaaggaagagatgagatca[144 bp omitted]tctcctgcctcagc[208 bp omitted]ctctcttgcctaggctggagtgcagtggtgcaattatcggctcgccgcaacctctgcctcccgggttcaagtgattttcctgcctcagcctcctgagtagctgggattacaggcacccgccaccacacctggataatttttgtgtttttagtacagatggggtttcaccatgttggctgggctggtctcgaactcctgtcctcaggtgatctgcctgcctcggcctcccaaagtgctgggattagagatgtgagccactgtacccatgcaagtttcttaacccttctcttcctcattttctcatctgtgagacgaagacagcctcccacccagacacactcccctcacggggctctggggagaaatgatgtggaaagctttgctagtaacctctacagcatggagggagttctggaaaagtgatttcagaaaggtgtttatgcctggaaagcctgttcatttttgtgatgtccttggagctgggccaggcattatcgagctaaatcttagcttttgtcagaataggggggtcattgagggaaatttccaaaggaaggtggaacgggatgggtggggaggtaagggcatgagcagaggcagtgatcgtgggcaggaggtgtccatagaagacgggctgccactggccctggagacagaaggtcagccccgggttcaaatccctccttaaccaagtgctgaaatggacaagttgctcaacctctctggccttcagcttcctcatctgtcaagcaggaatcaaacctcgaacttcctcccgctgttagaatttcaagggagttttaaagacagagctttcaactctgacctgtgaacaagtgtgacatcaaatgtactgttcgttgctattattctgttgctacaaggcagacagttagtttcccagctcccctgcagtccccccagcccctcctagatctgtctgccagccccgccccggggtcactccagccaggctgtgccaggtgaatgctcaggtatgcggaggcggaggcggaggcaggacggccctgggagggagcaggaggaggggccggcagcctggaagggaaaggacagcggagagcagggcagagcctgagcaggcaggtaaggagatccgggtcaggagagaagggggccggggcttgaccaatgggtctgagggacggggggactggggtctggactccagggtctcagggaggacgggctgggggtctgaactcccgggtctgagggaggagggcctggggtcctggactcctaggtctgagggaggaggggctgagggcctggactcctgggtctgagggaggaggagatggggcctggactcctgggtctgagggaggagtggactggggtctggactcctgggtctgagggaggaggggactggggtctggactcctgggtctagggaagagggactggggcctggacttctgggtctgagggaggaggggctgggggcctggactcctgggcctgagggaggaggggctggggcctggatgcctgcattgagggaggaggctggggtaggaattagaggctcctactggccaggccttcacatgtttgctggctcccagggcacctccaggtgggcaggagctaccactcagcaccatgagcaccgccacagggtaagcgcccccggaccccaggtcccagccccagcacgcctcccgcctcccctcgcctcctcacccacacccgcttgcggcagcccagactgtttgcggcggcccagactctggcccaagccccgacactcaggaggaagccagagcctctctcctccctgcccagcctggggttaggggcccccactgcagagcagacaggcctgagctccagttcggccctcacactcagtgctgatgtaaccctggtcagaggacatcacctcctggagcctcagcccctcctctgtgacacagggacaatgttgaaaaattggagggatagtgcattacaggacttagctgaccacctcactgacagcaggtgctcaactcataggagtcgctattgcgattgttatgttgttagtaaatattaaccctttgctagaaaatcagggctgtttataatgaagactcaagtcccccagagtaagcagggagaaaaacaatgagagatgagtcaaaatacctgcatggtaggtagtgagctctctggcccagaggtaatcaaattgtggtgacatcagactggcaggagcaggatgaggaacaggagtttgggaaaaagggtttttcagttcccctgacgccacctgatcgctgagcttctgttatgtgcatgcaagtggggattcaagaattcttaggaaaggtaatcttaggaagaaattgaggacgggaggagacagagaaggatgtggttgggaagcacctggcccatgggagtgggaggggaagcagataattccctgtctacttcagataccactaatgctattataaccattcccatttattgagcaacttctgtgtgctaagccctggcagcatcttaagaatgataataacagttattgaggcttcaaaatacttcacctgcatcatctgactgaatttgcccaacagccctaccagatggttactacgttacagaaagaaaaactgaggcaggagagattaaatcctcttctgaaggtcttatggcaaggaggcagtagacagagggtttgaatcccggactatgccatggtagagatcacactcccctaccacccagcaccaccgcctgacctgacctgtctttttttttttttttttttttttgagatggagtctcactctgctgccaggctggagtgcagtggcacgatctggactcactgcaacctccgcctcccaggttcaagtgattctcctgcctcagcctcccacgtagctggcactacaggcgcccaccaccacacccagctaatttttgtatttttagtagagacagggtttcacca[139 bp omitted]gctcaataataataataataataataataataataataataataacccttccatcgctccccattaccttcgtcatgaagcccttgctgccctgcttggcatttccacaggatctgcccccagtcccacagtctctctcattcctcttttcttcaccagcccagaagctgccccaaagccaagcgccaagtctatctatggtgagcggggggcaagggagccccaggcccatagaactgggtctaaagaaacaggacctggcatccagggtcttggaggaggaggggctgggggtctggactcctgagtcagagggaagaggtgctgggggtctggactcctgggtcagagggaagaggggctggggggctggactcctaggtttgagggaggaggggctgggggcctggactcctgagtcagagggaagaggtgctgggggcctggactcctgggtcagagggaagaggggctggggggctggactcctgggtcagagggaagaggggctggggggctggactcctgggtcagagggaagaggggctggggggctggactcctgggtcagagggaagaggggctggggggctggactcctgggtcagagggaagaggggctggggggctggactcctgggtcagagggaagaggggctgggggtctggactcctgagtcagagggaagaggggctggggggctggactcctgggtcagagggaagaggggctgggggcctggactcctgggtcagagggaagaggggctgggggcctggactcctgggtcagagggaagaggggctgggggtctggactcctgggtcagagggaggaggggctggggggctggactcctgggtcagagggaagaggggctgggggcctggactcctgggtttgagggaggaggggctgggggcctggactcctgggtcagagggaagaggggctggggggctggactcctaggtttgagggaggaggggctgggggcctggactcctgggtctgatggaggaggggctgggcctggactcccaggctcattctctttctcccctggcagagcagaggaagcgttactccacagttgttatggctgatgtatcccagtacccagtcaatgtgagtctggggtctgtgttcccccaggacatcttctggggcaaaggtggcctcaggagatagggcttttgaaagcagctaggcccccaagcaggaagcatgtggaaagtcagtttgcccatccataaaatggacctccgttgcctcacctcagtcatggatatgaagccaggggcctcgggtccacttaatctgccagcctttcctccaggccagctgttgtgctggacagtgggaccacggaggcaaatcaagacacagccctgcatgaggaaggggtagacaaggtccagaggaatccacagaggcgcctggtgctctaatggaggtggcagggggcatggcaggagacccgaggaggcatttagaaggagagagctataatccagactccttccctgcccgcaaggagcctccagtctgtgagaagccagactcaggtgctagtcactctgatgaaagggaaacaaagggcactgggaggaggagctgatttgtggaacaggtgatcaaggaaggcttcctggaggaggtgtggttagtctcaggctgaaagtctgattattctgggggattctgagcccacctggcatcatcttgggcctcactgctttctccatggtccgtaccagcacctggtgacgttctgcctgggtgaggacgatggcgtgcataccgtggaggatgcctccaggaagttggccgtcatggatagccagggccgagtctgggcacaggagatgctgctgcgagtgtctcccgaccatgtcacgctgctcgacccggcctccaaggtgccggggggcacgtgggtgggaggagtgtctggggcagggacttcagggggtctgggtgtgaatcttggctcctgcacgtccttcctctgggaactctggcgagggaccccagcccccttcttgagccttaatagcctcatctattaaacagggctgttatccctaaccccctaaccgcctgaggttgccctgacctgctggcccacactcccgtcgccatttagtagtaccatcatttcggggcctcagtttaccccgccatcccacccggcaggaggagctggagtcgtacccactgggcgccatcgtgcgctgtgacgcggtgatgccacccggcaggagccgctcgttgctgctgctcgtgtgccaggaacccgagcgcgcgcagcccgacgtgcacttcttccagggcctgcgcctcggggtgagcagatgggctggctctgggggtggagctggaactgggcggagcctggagccggggcggaaatgggtggggcctctaggtggggcggggcctggggctaaggcgggatcagagcaaggaagggcaggggacctgggaaggaagttctggaaggcagtggggtttgagattggacccagggtcaagatagaacatgaaggtgggatgaggacatgaacagaacatggccaagaaggatctgggggagcagccaggacgaggtgggggcgaggaaccacccggactgggtctccatgggcggggtcgtggcttagggcagggacaggtgtagggcgaggggtgagttcggggcgtggacgtgcgtgggttcacaggtgtgaacggtagccgcacgtgggctgggactgagctgaaaaatcggccaggggcgaggcccgggtaggaagtgggtgcggcgtggggaggcgtggcctgacggtgtgattggcaggcggagctgatccgagaggacatccagggggctctgcacaattaccgctcgggccgcggggagcgcagggcggcggcgctcaggtgagagggaagaagttggcagggtctctgggaagccggtttcccctccttgtgcctcagtctacaacaccagcctggaacagaacaagagttttgcatggagtcaagcacaccctagtcgagtcttgtctgtacctcccagacgagctgaccccttctccagaactctgcttcttttctctgttccctgtccaggccctcagtttcactctagagaggtgctatccctccgtatatcggatttctccctacctcgttgaacttgttcactccctttgagccttttgagcctgtgtgtctcgttctgcgccctggatttccccctccctggacccctcagtggacccagtcttggtgtccccgtcgccctccgcagggccacgcaggaggagttgcagcgcgaccgctcgcccgccgctgagaccccgcccctgcagcgccgcccgtcagtccgcgcagtgatcagcaccgtagagcggggcgcgggccgcggacgaccccaggcgaagcccattcccgaggcagaggaggcgcagaggcctgagccggtggggacctcgagcaacgctgactcggcctccccggacctgggtccccggggtcctgacctggcggttctgcaggcggagcgggaagtggtgagccgctaaggaaggggtctgggggcagggccaggcgactggaggcggggctagggcgtggaagggcggggccggctgcgggacgggcgttctctggtcagacttctgcgttatggaagaggggctgggtcgggggcggggcttggttgtggggcgtggccaggtgtttggggcgtggcctgatctggggaagtgtataggtgctcaggttcagggcttcgacggggatggttttggaactcgggagccctgagcgtccccctcctctgtcccctaggacatcctgaaccacgtgttcgacgacgtagagagctttgtatcgaggctgcagaagtcggcggaggcggccagggtgctggagcaccgggaacgcggccgcaggagccggcgccgggcggctgggggtaaggggcaccctggcgtgggatctgaaccccctcccgatctcttccaaatgtccccgctctccccaggctctcccctcccgccacttgccagggctgacctcaccgccatcttaaccgggtgtccacctctctctgcctgcctggtgctggccccgcgtccccatcgccgcgcccgtctgctcccctcagagggcttgctgacgctgcgggccaagccgccctcggaggccgagtacaccgacgtgctgcagaagatcaagtacgccttcagcctgctggtgaggacgcgcccgcccctgggccggggcgcgggcacgacgaacctgtcccgtccccgcacccacgccaaccacctccctccccacgccccaggcccggctgcgcggcaacatcgccgacccctcctctccggagctgttgcacttccttttcgggcctctgcagatggtgagacccgccccaggccctcgggcccccctgcagcgggaggaatcgggttcgacttgtagaaggtgtggcggcacagcctgcccctcctgctcccctgacagattgtgaacacgtcgggggggccggagttcgcgagcagtgtgcggcggccgcatctgacatcggatgccgtggcgctgctgcgggacaacgtcactccacgtgaaaacgagctctggacctcgctgggggactcgtggacccgccccgggtgaggggcggggctgggaggcagggggcatggtgattggaggagcataaggcgctgggaggtgggtggcatgatgattggaaaataggactaggagagtagggaggggttagaggcgtggcttagttgtgttggggcggggcttaggacagatgccaagattcaattggaggaaaggccaggaattaacgtgaaggaaagatttaagaccaccagaccaatcggattgaaagaaaaggggggcttaaaggaatagaggggctaggggctacggggcaggggcggggctacgcgaaggggcggggcttctggaaggtttggtctataactttggtgatgggacagagtctgtgcactgcgggctggcagttccgcagggaaagggtcagaacctgaaaccgaccttacggaaaacctgatttggaatcaggtgagatttagaggctggataaggcaatttttttccagagagagagatggatggggtctcaatattttgcccaggctggtctggaactcctggcctcaagcgatcctcccatcttggcctcccaaaatgctgggattacaggcgtgagccaccgtgcccggtctagaaatataaattgctgttgagttgggcttagagctaccggcaggacttggtgaaaagtggcggggctagaatcgttggaatacagcgagctttaggggaaaacttagtgaagttaatgcaggaacgaagttgggggctgtatcaggatccctgagctcttggccctgtccctggccgcaggctggagctgtccccggaggagggacccccatacagacccgagttcttcagcggctgggagccgccggtcactgacccgcagagccgcgcctgggaggacccagttgagaaacagctacagcacgagcggaggcgccggcaggtgacccaagcgacacagcagggccgaggctgggaagtccgggggcgcggccggtccgcctggccccgcctgacccgactgtcttacttcctacagcaaagcgccccccaggtcgctgtcaatgggtgagtgtccgccccagggcagggcaagggggtcaaggaggggtgcgtcccgggggctcccgatgctgactccgccccctttttttctgtgtttttccttctgtcttcctggctcttctcaggtgggtgagatggtgatggggcgggccggggctgggagagagggaggagcagggtgggagggggcgggacccagacttctggggctaagggagttgggaatggagacccggattcctgggcctaagggaggaagggggctgggagtgggtaaagtctgagaggttggatccctggatccccaaaaggctggaagaagccagtttgttttcccagggcctgggaagcaccatgcctgggctccctaggaggacagagccctggatattggaggggagaggctggggaattggacctttgggttttgaagaagagcccaagtctggtgcttgggatcctggagacccagaggagcaggcttgggacttcaagggcttgggggcaagtttctgggaaagttaggaagtggtagtatctctgggcccccgagaggggtaaaggctggacgattaaactcttggttttccagaggctctaatgcaattgtctaagtcgctgctgggtgtcggactgggttaaaaggtttgagggttaaaaggataagattgaagcttgagacctggactcctaggtccctgggggaggaaagaacattccaagtcatggttctaccaagcagtgggggctcagactctgggtcctgggggagggaaggaggtagatggactagaactctagggtccttgagcaaatagagggcagactggagggaagcaacgtgggaggagacgaaaacaaagcagtgaggctggaggagacaaaggggggtctgggtgagggcccgagcagagggtctcagcagggacagcgtgctgggagctgccggccccacacagggggtgccgcggccctgaagaccccccctctcccctgcacaggtaggcctgatccaggctgaggtccctcttattgggggtcagagctgaaatcccacccctgcccccagctgcctgatatcgcaaccctggtccctgttcacagcttcaagtcactttctccgagcctcaagttcttttttgcagggaaactgggaataatgattatccgttcccggaacagtgagaagtctgtggtgttgtaggaactagcagttaagggcttaaggctgtgaccaggttcaagttcaagtccagctgcctgcaaactaaggcagcattattcagacctgggctaccctggtcccgggctggcgatgccactctcttactctgtgacctttacatccctgtgcctcagcttcctcctctgtgaaaatggaggagatcatagggtctctgggggaggaagaaactgggggagagaggggagtccaaattcatggttctaccaaccgttgtcataaagatcaaattaactaatatacgtaacagaacagtgcccagcacacagtaagtggtacagaagtggtagctattgttttttgagacagtctcactctgtcatcaggctggagtgcagtggtgagatctcagctcactgcaacttctgcctgccaggttcaagcaattctcctgcctcagcctccagaatagctgggactacaggcgcgtgccaccacgcccagctaatttgggtattttttagtagagacagggtttcaccatgttggccaggatggtcttgatctcttgacctcatgatctgcccgcctcagcctcccaaagcgctgggattacaggcgtgagccaccgcgcccggcctagctagtgtttttattatgcttatgagttatgatatataaagcccagtgcctattagatgctcaataaatgacagctgtttctagctgtgtgatgtgggcaagtcattttctcgctctgagcctcattctcctctgtaaaatggaatcgatggtgggatagtacccactacatatgcctacagcacaatgccaagcaacggagggagcaaatatattcagtctgttattcttgtttcaaatttctattaacagtattaacccggcccctgctgtgcccccagcttggctctaaccccagctcacaccagcaccctgcagcccagagcaatggggctggctgcctccttatctccaaccctcccgcttctcctcagtcaccgagacttggagccagaatctgagcctcagctggagtcagagacagcaggaaaatgggtcctgtgtaattatgacttccaggcccgcaacagcagtgagctgtcggtcaagcagcgggacgtactggaggttagaggagcgggaggctgaggggcaggaattagccagccctagctgcagacaggctctgaaccctctgttctttaccacacccaggtcctggatgacagtcgtaagtggtggaaggttcgggacccagcggggcaggagggatatgtgccctacaacatcctgacaccctaccccggaccccggctgcaccacagccaaagccctgcccgcagcctggtgagccagcgcagacgctgggatcttgagggtggagaggctgggaccagatcctgggaacaaggggcgtggggatcagctgtcaagagtgctggagcaggtggtgactgggggttcagaaatgcatctccagaaaggggagaggctgggactctgagtcctctccctaacccaggtactctcctctccttcctttcagaacagcactcctcctccaccaccagccccagccccggccccacctccagctctggctcggccccgctgggacaggccccgctgggacagctgcgatagcctcaacggcttggaccccagcgagaagggtgagtggtggggacgccggctgcggggagcggtccttatccttgctttccaggcagagaaacgggggctcagaaagagcaaagggactcccgtcccattctggggacgctggagcgcccccccgccccgccctctggccccaggacccctcgccctgagcccgcactccctacctcccggtttcccgcctgcagagaaattctcccagatgctcatcgtcaacgaggaactgcaggcgcgcctggcccagggccgctcgggaccgagccgcgcagtcccagggccccgcgccccggaaccgcagctcagcccgggctcggacgcctccgaggtccgcgcctggctgcaggccaagggctttagctccgggtgagtggggccggggccctctcggcgcgggttgatacggacgctgggagcggagcgttccgatcggccgggagtcggggggcggcagtcgtggagaccacagggagccgggattagcccgaagtgagggtctgtctggtagcaacacccaatggcaggctgtgattgccatgttttttcagactccgactggattccttagggaaatcccgtaccctttgaaagcaggatgcggccacgccccccgggtggcaacattgtgattggtgggtggggttcaggaggtgtcgggcctgcccccgctagagctagaatgctgttctgattggaccatcgccgggtgggcgtgacatgattgtccgggctggggcatccgccgaccggcctgaccgcgcccgggctgccctcgctcaggaccgtggacgcgctgggtgtgctgaccggggcgcagcttttctcgctgcagaaggaggagctgcgggcggtgagccccgaggagggggcacgtgtgtacagccaggtcaccgtgcagcgctcgctgctggaggtgagccggaccgctggtccctgggtctgggtagggttgggatgacgagggctcggacgccaggacaaagcgatttccaccccgccctccaggacaaagagaaagtgtcagagctggaggcagtgatggagaagcaaaagaagaaggtggaaggcgaggtggaaatggaggtcatttgacctgccaggcgcccttcgcaaagagtgacgaggccccgtgggagaacggactcctcagactctccccaatagcggaagtcgatcttctgaaggatggccaatctgctccggccctggtcttcccccatcccggtggacagacttaacgatccttgctgcagtccctccggagaggatctggactggctgggagtggggagggcgtggagacagtctacggaaagcgctagcagacccccgagagggtgcagtggagccctgagcattgtaatatgcggcccagcctataaacagcctccgtgcttagcagatggtgtgccaactgctgtcctctacccggctaccagggggctcagaaacctgcccctcgacccagtcacagcctcatggaacctggaaaatgttccaccctctttggtttctctctgaaccctcctttccatccccagggtcccaaaccaggctccctcctgacctcctagccagcctagtccagcttgccccaccttcacgtttccctggctcgcggctgctgggcatgaggctttgtgtctcccttcccgcctcaccaacgttctcacttcattccttcctgcgtcctggccctgcccttctccaaacgctcccaagcgttcaacctctgaggtttgcacctgctgtctctgctggctgaaacggccattccctgcctggcgaactcctgttcagcctccctggcccagctcaaacactcactgtggggaagcctgccctcatccccgaagctagtttcccagcatccacttctccattttgtcccccacctcctgccacggccctaccaggtagaactggctgcctcccaagcatgccacagctttctggccactctttgttctgggagatggcagccaactgaaaacttcctaatccctcaagaactagctccttctccctctggcaagccctgtaactttcttttccccattatccaggtggctggtaaggtctgcttttctctggatcccactgttttccagactggatattctctgcctttgggaagaatggccctttctctttctcccctggctctgccttccccagattactgagggcctctgggcctctgggcctcaagcctctcccggagttgttccaacctgggccaccagatggcgccctccaagatgggaaaggatcagagagacgcccccccacccccaccccgccccccgcccttggggcaggcaggagttctcagtccccactttgccacctcctgcctggttccttctggttccttccttcctctttggatctccaagagtccttctcctatctgccccgtccctagatcctattcacatacttcccttggctccctatggctcaccggataaaaccaggccccagcttggcagtcacaggttgcccactcggctcaccagcttctccgaccacggggctcagcttccctcctcctgctgccaagcttggttcatgtggttgcttctgcccagaatactctcagcccctctaccacttgcccggggccccacccctcattcttagtaggggaataggaaaggtaggcaattcccccaaacctctttgctccattcccgcacccgccccccgccccccaataagcccccgtggctctcgccacctaggctgcaaactgaaatgcctgcaggaacccgacaagagacccaagtgagccagccgggcctcagccctacccccgtcacaggccagcttgtttgaacatcctggcagctgtatcttccaatattctcagaacctgaccatctctcaccatcttcactcccatcaccccagccagagccaccctctctcttgcttggatttcaccagtagacccttagctggtccccccaatcctcaccaccaacccccagcctgttctccatgccagagggacctgttaaaacctaagtcaggccatggccatgctccaaaagacacccagagctccaatctcacagctcaagcccttcccagggccaagtctccacacagccaccgtgacctctctagcttcattccctgctttctccagctcctcagcttcctgcagcacaccaggtgccctaccccagggcctccacacacacagctcccatcatccctcaaatacctacacagctccctccccagggtctccacacacagagctcccatcatccagagcacccttccctcaaatacctacacagctccctctccaccaccttcaaccatctgcctgcaccagcttttccctgaggcctgcctagaccactctattcaaaacacatgtgcacacacgtgcacccaccttcccaacccctttcttttctccagagcgccgccaccttgaaatacatttattttaacatcggatgcccccctcctaaaagtattggatctttgttttgttcagtaatgatcagtcacactgtactcactcagtcctgttcttcctgttggtgttatactaattgttgaatgaatgcctcatctcagaagatggctcctactcagctctagtcaacggtggctatgcaggactgaaaagttcatattgtcacagattcctgttctttcaaaagaaggcaaaattctttttgttttttgtttgtttgtttgtttttgagatggagtctcgctctgctgcccaggctggagtgcagtgactcgatcttggctcactgcaacctctgcctcccaggttcaagcgattctcctgcctcagcctcccaagtagagtagatgcgattacaggcacctaccaccacgcctgctaatttttgcatttttagtaaagaaggggt[146 bp omitted]aatgttggcaattgactaaatttgtttcaaagacactgatggcaaaacccaaactccccagctccacatccttggccccagaggtcttgcccgctgatccctcctgccccatcagcttcccctcagccccccgcctgcgatcacgcgggctccgtcttggagccttcgctcccgctgggggctcatcctgaagctccttcaccacacaggtgagtaagcaccagcccatcccccggcacccacccaagtggcccagtggtttggtcatggacacgcacggccccccagcaggagcaggaaacagtgccctccctctggctgggaacacagagcttgagtggcaacttcacgacttttatttgtggtgcctgtgctttatctcgaaaataccttctccccctgccccagacagtgggcggggagggggcagcaaaaaatagaagacgtccctccctattgcacatggaccctatatacaggcccacctggctgaggctggcgggactcttggcacattcttggatccctgctcaggaggggaggggtgacggggtggcatcacacgtgagatggggacctccaggcggccactctggtcctggctactgatccttgcacttcttggtcctcagttccttcctggtcccgtctctggccctggtcccctctggcaacgtccccctgcttggctcggcctcccacctccatcctggcctcgggtggccccctcggctcctggggactctgctcccctcccagtccggaggtcccaggggggctatggcttctctgagacttcccccggagccctgtcactcgtgttcacacgggggaaggggtgcgtgtggcagaagcagctgtataaatacgggtgcgggaaagtccctccgggtcacttggagagtttgctgatgacgcggatcaacgctgcattctcatccttgaggcgctggttgtcagcgcggaggtcagacagggcctgggggacggcaagggtcagctgggcagccctggcgggttgcacccccacccaccctcggccctctgcccacagcccccacagcccccaccttcagctcctcctccagctctgcggccttgcgttccagggccctgcgctcctggaatgaacagggaaagtgcagaaactgagtgaggctgaggagggcaggggaaggccaggggccagctgggaagggcaatgtggctcccttggtccaaacttagggatgtgaggctggggacgcctctggcccccatccccactgcccctactcacgaatctctccagttccaggagggctggcctctcagcgaagcgttcttgcctctggtgaggacacagaaagcacaggggtcagcagaagaagccagcactgctctgaagggtcctaggctcctgctgggcacccgcccgcccactaggcagcccacaagcccttcccccacgggccaggccccgccaccggcaggcccacagccccatcccctcgctcagactccgcctccgagatctcggccccgcccctcaagtgaagcccagccccgccggcacccccaggccaggctctacctcccagcagtctaagccccacccaggcggccctgccagttcccgtgaccctggcctcggcgcccttacctgcgtggcccgctccagctccaccttgagctgcgccagccgcagcgtggtctcggtcagggcctcgcgaagccgctcgttctccctgcgcagctctgcatacagctgggggtcaggtagaggagggtcaggtggaggatggggcgatgctgggggggcggggaagccaggaagctgggcacccagcaggcaaagccccgacggaggggtgggatcgcaccgtcctaaagcctccgtctggctcttccgattctggctcaggttctgggttgaggtcccgctgccaccgctgcctgcgggccgaggggccgccctccagggtgctggggcaggggaggagcgcgcgtcaggggccggcccggcccgcacgcagaccccacctctcccaccccgcccctacctggactcctggctgcggtcagccggctccgcctcctccccctgtgggcaggtagacgggggttcaatgggtatgggagggactttagcgggtatgggaagggctttgcccgccccccggcccaccctctgcaccagctcggccccacctgagcccctcacctccgcaggccccctccactcctttccgaccttgcggtgctccctggccgcctgcggtcccggaccctgcccgtcgggcgcctctgctgggggaggggcaggaatcagcccaggcacctccagagccccctctcggtgcctgggtccccgggtcaagcccccaggaaagcaagaagactatgggagaaactggatgattccctgggaatgacctccccgagagcagacctcacctctctgggcagggctgtcagagttctccactccagggacgcggggccttcgggaagggtcctgtcgggagggggaggcgagtcagggaagcaggacatcccgcaccaccccactcgccctcgctgacccctctcaccaggctctgcgccggcttctctgactctggggccttccctgcagccttctctgcctccttcaggtctgtaagagtcacaccctggcagggaaaggggacagtcaggggacgctggggtcagggcccagcccctcctccctcagacccaggagcccaggccccagcccctcctccctcagacccaggagcccagaccccagcccctcctccctcagacccaggagtccagacctccagcccctcctccctcagacccaggagtccaggccccagcccctcctccctcagacccaggagtccagacctccagcccctcctccctcagacccaggagtccaggccccagcccctcctccctcagacccaggagtccagacctccagcccctcctccctcagacccaggagcccaggccccagcccctcctccctcagacccaggagtccagacctccagcccctcctccctcagacccaggagcccagaccccagcccctcctccctcagacccaggagcccaggccccagcccctcctccctcagacccaggagcccagaccccagcccctcctccctcagacccaggagcccaggccccagcccctcctccctcagacccaggagcccagaccccagcccctcctccctcagacccaggagtccaggccccagcccctcctccctcagacccaggagtccagacctccagcccctcctccctcagacccaggagcccagaccccagcccctcctccctcagacccaggagtccaggccccagcccctcctccctcagacccaggagcccaggccccagcccctcctccctcagacccaggagtccaggccccagcccctcctccctcagacccaggagtccagacctccagcccctcctccctcagacccaggagtccaggccccagcccctcctccctcagacccaggagcccaggccccagcccctcctccctcagacccaggagtccaggccccagcccctcctccctcagacccaggagtccagacctccagcccctcctccctcagacccaggagtccaggccccagcccctcctccctcagacccaggaatccaggcccccagcccctcctccctcagacccaggagtccaggccccagcccctcctccctcagacccaggagtccagaccccagcccaccccacacctgtgtggacctccgagactggcgcatgagacgggagcgagcttttctctgggattccgactcctcatcccgcacaggcatctggtaggacctgagggaagggtcccaacctcagacagggaacctggggaccctgtcccattccgtggctgacaccctccgcgggaagcaagttctgtgggaggggactccaactcccagcagacctgaggccagctctccctcaggagcccacccaaagccccgggactcctgcttcacatcgtctctccctgctgggggcgggggcggcagcttcctgccctggcctcttcacctccgtcggtcccgggagtccgctgggggcgccgtggaggctgtggggacgtttggcttcgctggggattcaggctccggaatcctggagggaggcgaggagttctccaagcaaggaggaggcttggtgacctcagacctgcatcaattcattcattccacaaacattacccaggtgcattgtgtgccggcactggagatgcagccgtgagtgaaagaaacaaattatctgggccacaacagagtcagagctgagcagaaatacacaaaacccacaaaagccatgaaaagaccagcacactacgcaaccggtcagaaggataaaggactctggacagaagcagcagtgcgagaactgagagcgggagggtgtgcgtgtgcggacggcgccgtggtggcagcagggtggtcagtgtgcacctcggggtggggggaagataggggagaaggtgacgtttcaacacagacctgagggagggagagagcccccaagaggaacacagcacaggctctggagtggcggcaggaaccagaccccagggggtacatggtctcactcaggatcacacggacaggcttggaacccacatctgccacccacccctgaggggcccaggccctggggactcacaggacagagggctccggcagcttcggggagggggtcggggtaattctggcaagacggagctccttggcctgtgtggagaggagaaggggaggaaggggcagttccctcgactgggcaggggcctgggcctggacccggcccaaccctcactcacctgagtggaggtcccttccagccaggaggaggaagccgagcgctgcagcccagccccaggggctccctccgctgtccgcctttcagggggacccagggcaccagaactccctgtcttcaggaggccaaagcgcctggagaagggggcctcttcaagctgctgggagaaggaggaggtctcagttagagagaaaggatccctcttctcagacctcaagggttagcccccaaaggactgcaacaaactacaattcccatcagcccccggggcaggcacagcctaaaaaggaagccggttgtccaggacgactctgggaactatagtcttccccctatctgcccctgccagaggttcacaggctgtatggaatcccacctccgggccctcccagcctcacaggacctctcagggcatccactcaccacgggactcttagggctggggtgcggcggggaggagacgccattgagggttctgggttctgcagggggtggttctgtgatgtgggaacaccgggcaggtcacagaagatgccagttgcctctagattcagagaacccgacccctcctccctcggacccaggagtccagattcaggcccctcaccggtgggaccttcttccccctcatcctcgtcctggatggggggccccccagccccaccaggccggcgctccttggacaagtcctggagggaaatcttctcgcgactgctcagacgacacacagagctcctgttggggaaggagagggtgctggggtacaagcccggggcctccagccaccccgccagccctggactcctccctccctataccttctgtgtttgctgctagagggcgcttggggctcctggccccggctctgggaagcttctttttggttccgaagctgcaaggagggaagggggctgcaggggaggggtggagcacacgtgccccacagcaacaccaccacaaacagctgtgcaggagctcactgcccaggcgggcaccgagggctcgtgggcttactggttttcctacagatggccacacacctcaggggcaggaggtgccctgcgtccagcaggcgcccgcagctgccacgtgcaggcactgccgtcttgtcctcacggcccccacccatgagaagcctccagtctcatccccagaggggtccttctagctcccaggggagacctgcttagacctcaccccgacccctcagcatacccagggcactggtgggccctcagctgccccggctcctgcagccggcactcgcctcctccttccccgcgcagttcaccaccgtcttcacaccttccccgcagttcaccaccgtcttcgccccttccccgcgcagttcaccaccgtcttcaccccttccccgcgcagttcaccaccgtcttcgccccttccccgcgcagttcaccaccgtcttcgccccttccccgcagttcaccaccgtcttcgccccttccccgcagttcaccaccgtcttcgccccttccctgcagttcaccactgtcttcgccccttccccgcgcagttcaccaccgtcttcgccccttccccgcgcagttcaccaccgtcttcgccccttctccgcgcagttcaccaccgtcttcaccccttccccgcagttcaccaccgtcttcacccctaccccgcgcagttcgcagttcaccaccgtcttcaccccttccccacgcagttcaccaccgtcttcaccccttccctgcagttcaccaccgtcttcaccccttctccgcgcagttcaccaccgtcttcacaccttccccgcgcagttcaccaccgtcttcacccctaccccgcgcagttcgcagttcaccaccgtcttcaccccttccccacgcagttcaccaccgtcttcaccccttccctgcagttcaccaccgtcttcgccccttccccgcagttcaccgtcttcaccccttccctgcagttcaccaccgtcttcaccccttccccgcagttcaccaccgtcttcgccccttctccgcgcagttcaccaccgtcttcacaccttccccgcgcagttcaccaccgtcttcacccctaccccgcacagttcgcagttcaccaccgtcttcgccccttccccacgcagttcaccaccgtcttcaccccttccccgcgcagttcaccaccgtcttcgccccttccccgcgcagttcaccaccgtcttcaccccttccccgcagttcaccaccgtcttcgccccttccccgcgcagttcaccaccgtcttcacacctttgtactgggagggcccttcattcctgcccttctagcaaactcttagtgctgtagtactcacgtcttccagaaagtgtccccagatgctcccaggctggtctccccccatatctgggccccctgagctgaccctgccccacctattaaacccctcatggccgtatcaccctcaggatggaagccaccatgctcctcgcctggcactcgtggccctcccgggtctgccctgccttacgctcccctccctgggcacctcagggcacccacacttgccccccagcctgtgtgagatcttctcctacatccatcagcctccacttcgctcctgccaacctttcaaaagaggaagctgtctccgctcccctgcccacgcaccagaagccctaggcctggccttgggagcttcctgtcacctcacagagctcactgaacgctggcatggctctagtgctttccaggggcacgtactcccccgagctcctgacagcacaatccacgtgtcacgcatgacccctcatacagttgcgcaccataccattcccatttgacagataaggaaactgaggcccggaaaggaaagtggctggctgagactcacggcagatccatggcagagccgggattccaacccaggcagtctggccaaggctcacgcccttcactccttcactctaagttttcccagcaaggctgccccggggatggctgggggacaccttgtgggtgaccagcccagcctgagtctaggacaatcctgcacatggctgctgccaagggccaccctgaggtgatgaggtgtgctaagcaacctcatcagggtgtcagacaaccctgtccaaatccttctgccgcccccaccaccaggcaggcaggaagctctgcagccccatctctgtcctgccccggctgggggtctctcctgaggctggggctggggctgggtcaccaagagggaaatagcaggtcgctggggtggtgggtgtcagaagtcgggggggttccccctctgcaccctcctctgaggagctgaggggacatggggagtctggggtaagcccctcagccctgacactcacgtcctcctgtttccgggccagttcctccaacaggctcagtacttcctcatcggccaggtcacagggacgctgcccctgggtcaggggaggagcaggatcagacaatgaaggaggtgctgggccctccccacgccctgcccctcaccagcctgggcactggccctcaccgcatgggtcagtgagtccatgcccccgccatgctcggccagcaggcggcaggcatcctccacgccccagtgtgccgctgcgtgcaggggagtccagccgtccccgtcccggagctctgggtcgtagccagcctgaaggagcaacctgggggccagggaggctcagggtcagaggccaaggcggggcccttggccgagggctgatttcggccagcggtttggtaacgaggtcccaggccacgagactgaaacgtccctggacaggctggtaaagagccactgcccagcatccgctgccacaagaggcccctctgcaccaggccttgtccctccccttggaccagcagttacatgttaaaccctgaccctgcaggtggcctctggaacctgctcctggtgctggcagggggtcaccctggctgtgggattccaaggtggcagcagcggggtgtaaggaggcagctccggaggatgcaagtgcaggacccttgccagcccccatgcctgtcagaaggatgggacccccaaagggctgtctcagggcagtagtgctctaggacccgggctggcttaaagcagtgactcccaaccagggcaatgctgtcccccaggggagacccggcaggtctgcagacatctttgttgtcataacttagggcaagggttagcggcatcggctgggtggaggccagggaggctgctccacacccggctgcgctcagagcgctcagcagcagccccacaaggagagggacctgacccaacatgctgccagcgcccaggctgagaaaccctcacccgagacagtgttctgcgagaaaacaataaccaccttaaaccattcaatctgagggcaaaggcagggttacaagtccaaggccactctccaagctcagcttaacggtaggacgtgtctatttttggagaactggaatgagtttctgtgtcaatgagaaagagcttcacaaagtgggaacagatggacagcctgggatattctacaaagaggccttataagcacaagtccctctctctggtcccgcccaccttgcccttcacctttcccacgctttgcccggagctcaccctgccccagctgtgctgggccctcgctatttccccaagcgtccgctcgccgctggcctctgcacttgctgctctcagccgggcagtgttctgtgccctgcagcatctcacgctgagcccctttttggcagtcaccaccccctcatccccctgtctcctgaccccaaagcccctcctcatcacacttgtcttctcccataaccctatttatatcttaagccagcagttctcaactggggcaatgctgccccccaggggacatttggccacgtccagagacatttttggttctcacaaccagggatgctcccaacatcccataggtggaggccagggaggctgccccacatcctgtgatgcatgggacggccccgcagcaagagcgatcagcccaaaatgtctgtctccccacgaggctatgagccgcacacaggcccagatctgtcttgtttacccatttccctggcacctaacagactgcctggcacacagcaggggctcaaaaataagcatcgaatgagtatcatcaaataaacatatacctctactctgcaacaaatgtttttttgttttgttttggtttggttttgttttgagacggagtctcacactgtcacccaggctggagtgcagtggcacgatctccactgactgcaacctctgcctcctggattcaagcaattctcctgcctcagccttccaggtagctgggattacaggcgcctgccaccatgcccagctaattttttgtatttttaatagcgacggggtttcactgtgttagccaggctggtcttgaactcctgacctcatgatccgcctgcctcgacctcccaaagtgctgggattacaggcgtgatccaccacgcccagcctgcaacagatctttgatgaggagaatgctggttacattattttaaaaatgcagtcaggctaggcacagtggctcatgcctataatccagcactctgggaggctgaggcgggcagatcacttgaggtcaagagttcgagaccagcctggccaacgtggcaaaacctgtctctactacaaacacaaaaattagccgggcatggtggagcacacctgtaatcacagctactcaggaggttgaggcaggagaattgcttgaacccaggggacagaggttgcagtgagctgagaccgcgccactgcactccagcctggcaacagagcgagactccatctcaaaagtaaaaataaaataaaaaatgcagtcagtaggtctgagtgtaaacatgtccccttacaaaggagcagcaatgacactatagtcatgaatatttctaagtccaaagtgcttcacttccacgaatatggattccatttctccctctactaacagtacccacacaggccccctggccggacacaggccacccagctgaagacaaatctccaactgttccttgcagcgaggagcggtcatgtgactagcgtctggcaaatgggatgctggcgttaagtggtgccgcttgcggactgctcttttgaaaggaatggatgtttgctcctttgccccctctctcttcctgctggctggtatgcaggtgcagtggcaggagatgaagccgcccccaggactcaggggtggaagccgtgggaggaaaaggacacggcctccaggcctgggcacatcactaggcccaaccatttagagtttccagtcccccttgtcgtaaggatcagctcagggatgggcccagtcagcaacagagctgggacttggccagacactgaggtccaggggctctgcttcagcaggtgctaagcagaagggacagcggtctggagctgttacgggtgctaggccgaagggacagcggcctggagctgttacaggtgctaagccgaagggacagcggcctggagcggttagaggcatcttatgtacctcaccgagaaaacctgactaaaaactgtcaacatagagatgagcagagacagggaggaattcatgttaacttcatttttatactaaataataaagtatatgatcacaaaagagagaagagggaactgaaaaaagaatgaggagcctgaggatgagaactggaaccaacaactttaatagaaaggggaaaggcagccaaataggaacaaaatctaagactgaggtgaggatgacagaaagggaatgtgtactagaacaatttaaactatatatgcaccttggttgggtgcagtggctcacgcctgtaaccccagcattttggaagactgaggcagggagattacctgaggtcaggagttcaagagcaacctggccaacatggagaaaccccatctctgctagaaatacgagttagccaagtgtggtggcacactctcatagtcacagctcctggggaggctgaggcaggagaattccttgaacccaggaggtggaggttgcagtgagctatgatcacaccactgcactccagcctaggtgacagagcgagactccgtctcaaaaacaaacaaaaataaactatatatgcaccaaataatctagtcttaaaatatatacaaattgtaactgacagaactataagaagaaacaaagtccataatcacagcaagaatttaaatgcacctctcatagtaactgacagaataagcagtgggtgaaatatcactaaagataaagaagcactacaaataaaacagcatgattacaaggttgacctaataacctacagagaacactgtacctgatgacaccattcttttccgacttacatgtactggggtatataaggtaaaacgatacatttcaaaagctagaatcatatggaacccattctctgaccacaatgcaattaagccaggaaaatagtaacaaaatgatgactagaagtcctatatattttgaaattaggccaagcacagtggcttacacctgtaatcccagcactttgggaggctgaggtaggaggatcacttgagcccaggagttcgagacaagcctgggccacatggtgaaaccccatctctacaaaaattagcggggcatggtggtgtgcgcctgtagtccccactattcaggaggctgaggtaggaggatcacctgagcctggggagtttgaggctgcagtgagccacgactgtgccactgcactccagcctgggtgacatagcaagaccctgtctcaaaataaataaataataaaagattacaaattgggaaatattttacactgaatgacaataaaaaaaagactgcacatcaaaacttgtgggtacagctaaggctgtatttagagggaaatacatagccttcggtacatacatttaaaaagaaagggaaaggacaagatccacaggaaggtataagacagcaagatggaacagactggcccaactcacctcatcacctcaatgtagcccttggcagcagccacgtgcagggcagaggcgcctgtgcgggggtgccgggcctctggcatggcgcccccattcagccagcacctcgtgtcatgaaggagcaattcctcttctgcccgcttggctgcttccacatccacacctaggaggataagaggcacgaggtaggactcacaccccatgacctgaaatacccagggtcatacactgggctggccagggttcagcccagtgacttgcccagagctcttccccctgctcccctctgagactcaggaggcccagactagcccagttgtttcccaactgtactccatgcagtcgtgtgtcccactcagggtctctgagtcagcgctaagcactgggaaaacggagatcacaggcctttccccatttcaaccagaaattcaccgtatttttattatttttaatataaaaccatggccgggtgcagtggctcatgcctgcaatcccagcaactttgagaggccaaggcaggtggatcacgagctcaggacttcaagaccagcctggccaacacagtgaaaccccatctctactaaaactacaaaaaaaaaaaaaaaaatttagccaggtgtggtggcaggtggctgtagtcccagctacttgggaggctgaggcaggagaatcgcttgaacccgggagttggaggttgcagtgagctgagatcacgccactgcactccagcctgggcaacacagtgagactctgtctaaaaaaaaaaaaaaaaaagtatatatatatatatatatacacacacacacacatacaaaaatataaatataaaaaatatttatatatataatatatatataacatatatatgcatctcctatatatataacacctatatatacacatttcctatatatataaaacctatatatatatctctcctatatatgtaacatatatagacagaagtggtaatggtgataaaatgtatgaagatgctggattaagattatattggggggtggcacaacggctcatgcctgtaatcccaacactttgggagaccaaggtgggcagatcacctgaggtcaagagttcgagaccagcctgcccaacgtgttgaaaccgtgtctctcctaaaaataccaaaattagctcagcatggtgacttatgcctgtaatcccagttacttgggaggctgaggcggaaggatctcttgaatcttggaggcggaagttgcagtgagattgcaccactgcactccagcctgggtgatagagtgagactccgtctccaaaaaaaaaaaaaattatattggtagtgacaggaaaagttagatgtaattgagcactggatttgctcagtaaactttaggccatatatatatatatatggtctcgctctgtcacccaggctggagtgcagtggcatgatcttggctcactgcaacttctgcctcccaggttcaagcggttctcctgcctcagcttcttgagtagctgggattacaggcacacgccaccacacccagctaacttttgtatttttaatag[132 bp omitted]aggacctcacactgtcacccaggctggagtacagtggtgcaattatggctcactgaagcctcaaattcccaggctcaagggatcctcctgccttggcctcccaaagccggcatgagccaccacacctggctgtgtcatttctttaaaggagtcaccaactgttcaatcctattatagccgaatgggtctcaattcagggaggggaagggagggtgactggctttttattcaaccacagtcagcgccctctgcatgtctgctgcacatccttctgcaatttgcttcttgtgttcaacatgttgctgagatctgtctgtatctgtagacagagcccttgcccaggggtcagaaagctatagcttgtgggtgttgaccacctgttgtgttttctttatcttttgttgtggtggtggtggtaaaataaacaacataaaatttaccaacttccctgttttaaagtgcacaattcagtggcatttaggatacctccaatattatgcaaccatcaccactatctacttcctgagctttttcatgatcccaaatggatactgtatccaagaagaagtcactcccagccaggcaccatggctcatgcctgtaatcccagtactttgggaggccaagatgggagatcacttgagcccactagtttgagaacagcctgagcaacatagggagaccttgtctctagaaaaataaaattagctgggcatggtggtgcacacctatggtctcagctacttgggaggctgagatggaaggatcacttgggcccacgaggtcaaggctgcagtgagccattatcactccaccgcactccagcctgggaggcagcgtgagatcctgtcttaaaaaaaaaaaaaaagtcacttctcagacctccctctccgccagccccttgcacccagcaatctttctgtccctgtggatttgcctattctgaaaggcgatttttgtcaataaacgtgggatggaacagtcattcccattcattcacacaccatccctagcagtctcccgctccacagcactagtggaatagtggtgccaggcatggtgtgtcccgcaacacctgaaacattcattgtctagccctttacagagaaagtttgctgacccctgcttagatcactcatttagagtttagtgattgatccatcctctttggtgtgggctccgacctcttactactgcaaacaatactatgatgaacatctgcccatggttgggaaggcctctctcgggctgcccaggagtggaactgctagaacaaggcaaagctggggccttcggctataatccatgctgaccaaccacttcccaaagtagctggaatcatcacctttcccaccaggcagaaatcagctcccgtgtccgcccttgtcagcacttggagctatccaatggtcgattccgcctgcctccaagggtaactccccctcttccagctgacttggatgctggaattccaagtgagctggcttcaaatgtttcaaaaacacatcatgtcttcttcctgccagttccatgcccctgtgcaaagtggccagggagggtcccttctgcacaggacatggtgctgctgcgtgtccctgcagcacagctgctgcttgggcctacgaaaatccattctcccttcccctgtgacctcatcttgactttcctcacccacactttgccccatatggtttcaatgtgaccgggcccatagcctggctccagggtgcgcacatcaccaggccttcctgtcacctttgcaacagtgatgggctcaggagctgccatctgaccaaggtggcccagtgagcatcacgcacagggcaagaggtgctgtgttttggctgtgatatgggcctgcagtaggacccatgctgagtgcctcacggagagaacctgtctaagagtgaagccaacagagttcagcagagtgatagagagatgctctggacttcacttgtgcccctggatcaagctatgcctagagcccatatggacttcagctacataaggccatagactgcctttaaaaaaaaaaaatgtgaccaggcacggtgactcacgcctgtaatcccagcactttggggggccgagacgggtggatcagctgaggtcaggagttcaaaaccaacctggccaacatggtgaaaccccatctctactaaaaatacaaaaattagctgggcatggtggcgggtgcttgtaatcccacttacttggaaggctgaggcaggagacttgcttgaacccgggaggcagaggttgcagtgagtcaagaccatgccactgcactccagcctgggcaacaagagtgaaactccattgctgctgtttttcacaatagcaaagacttggaaccaacccaaatgtccatcaatgatagactggattaagaaagtgtggcacatatacaccatggaatactatgcagccataaaaaaggatgaattcatgtcctttgtagggacatggatgaagctggaaaccatcactcagcaaactatcgcaaggacagaaaaccaaacactgcatgttgtcactcataggtgggaaatgaacaatgagaacacttggacacaggaaggggaacatcacacactggggcctgtcgtggggtggggggagggacagcattaggagatatacctaatgtaaatgacgagttaatgggtgcagcacaccaacatggcacatgtatacatatgtaacaaacctgcatgttgtacacatgtaccatagaacttaaagtataaattaaaaaaataaaaaataaaaataaaaataaagaaactccatctcagagtgaaaaaaatgtggtaaaatacacacagtataaaatttaccatcttttttttttttttttgagatgctgagtcttgctctgttgcccaggctggagtgcagtggtgagatctcggctcactgcaacctccatctcctgggttcaagcaattctcctgcctcagcctcccgagtagctgggactataggtgtacatcgctatgcccggctaacttttatattttcagcagagacggggtttcaccatgttggccaggctggtctcaaactcctgacctcaggtgatctgcccacctcggcctcccaaagtgctggattacaggcctgagccaccgcgcccagcctaaaatttaccattttaaccccaattcagtggcattaagtagtcacaattggttgttgtgcaaccaatctccagaattttttcatcttgcaaaattaaaatcgtgtaccctaggtcagggacaatggctcacacctgcaatcccagcactttaggaggccaaggtgggtggatcacttgagctcaagagttccagactagcttgggcaacgtggtgaaaccccgtctccacaaaaaatataaaaatcattttaaaaaatgtgtacccactaaactacttcctattctccccactcctcccagtccctgactacagccattctactgtctgtctccattattttgactattctgggtacctcacagacgtggaatcagacagtaattgtccttctgtgactggcttattttcacttttcacttagcataatgtcctcaagatacatctacattgtgtgttttttgttttgtcttgttttgttttttgttttgagacacagtttcctcttgttgctcaggctagagtgcagtggcacgatcttggctcaccacaacctccacctcccaggttcgagtgattctcccgcctcagcctcctgagcagctgaggttacagggatgtgccaccacccctggctaattttgtatttttagtagagacagagtttctccatgttggtcaggttggcctcaaactcccgacctcaggtgatccgcccgcctcggcctccctaagtgctgggatgaagactgaatcatgtcccaccgcatggatgggccacatgttgattttccattcattcgatgatgggcactaggttgctcctacctctgggctattgtgaacgatgctatgaacacgggtatataaattgccttttttgttttggtttatttggttgagacagggtcttgcccccaggctggagtgaccgtggttcactgcatcttccacctcccaggctcaagcaatcttctcacctcagcctactgagtagctgggagcgtacgtgcattcccacgcctggctaatgtgttttgttttatagagatgggttctcactaggtttcccaggctggtctcaaactcctgggctcaagagatcctcccatcttggcctcccaaagtgctgggcttacaggtctgagccactgtgccaggcctcaaatggccttttccggcctgagccaggaggaacgggttttggttcttgcaaagagtcatgcccgattcagcccctgagtcgactgggccagaggactttgcggtgttggagggagcggtggctccaggccacgaggtgactggctgagcagatcacgtgctctcactgaaccccagacccagagagaggaaaacagcaagtaagccagggaaagcgaaggggatggtcgtgcctgaggccggtctgtcttctctcccagccctgcctgtgagtggctgccagggccacactatggccagagccagtctggatgccagcacctcggggaattctgcatcatgtgggcgtgtcctgcagggggtgcaaaagacccgccctccttagagctggggtgcagcctgtgatccaggtcctgcgcactgcagcccctctgaggctcctgtgtggagccgggtgtcacagggtgtcacaggcagtcgccttgtgatttggggccgcagagtcccaccccgagcagcacggctgagggtctttccagtggccccagtggtcttcgttcctggctgatcctacaagccaatatcccccaccaatgtatccctcccagccttctcctcaccccacgggagggaagaagcatggccccctctgagaagctgatgcaagttatgagcaatttctgcaggaaaatacaacgtcagaaagttcacagaccccctggaggccattcccggcctccctggggtccaagggaaaaggaggactgatccagacagagggagcctaaatcacccagatctggatccctagctgggccctgaaccagagcgggagaggctacaaagaatgtcaaggagaaacgcaggcaacagtgtagcatcaaggttggtgcagtgggtgagagtgtagcatcaaggttggtgcggtgggtgagagtgtagcatcaaggttggtgcggtgggtgagagtgtagcatcaaggttggtgcggtgggtgagagtgtagcatcaaggttggtgcggtgggtgagagtgtagcatcaaggttggtgcggtgggtgagagtgtagcatcaaggtcaacacagggggtagcgtgttgcatccctactgtggttctgcaggaggttttccttgtggcaggagatacctgctgtgcatcaggcgaagatgtacaatgcctgcaacacagtctcagaatggccgggctcacgcctgtaatcccaacactttgcgaggccgaggccagcagatcgcctgaggtcaggagttggagaccagcctggtcaacatggtgaaaccccatctctattaaaaatgcaaaattagctgggcatgctggctcacgcctgtaatctcagctacccagaagctgaggcaggagaatcgcttgaacccaggaggtggaggttgcagtgagccgaaatcatgccattgcactccagcctgggcaaaaagtgaaactctgtttcaaaaaaaaaaaaaaggctcaggaatggaaaggcaggggtggggtggtaagaaaggaagggagagatggagggaaaaaaacaggaggagaaaggataggaaaaaatgtgtttatgtctatacctgggaagagatcgcaagggagggacagagagaaggaacacaaatctatcaaaaagttaaaagctgatgattctatactgtatgattccctttatgtgaagtgtacaaaacagcaaatccacagacagaaggcagagagggcttcgtggggtgggggggaggggggggtgcatggttgggggtgatggctaagcggttgcagggtttcgttgggggatgatgaaaatgttctacaaccaatgtggtcataaatgcccgaccccgtgaatagactaaaaagcactgaagtgtgcactttgggtgaattgtagggtaggtgaattacatctcaaaaagctgtctaaaaaacaaaaacaaaaaagaaaaagcactggcgaatcttagtgaaagtcatatgggtagtcacatgctattgcttcaacttttctgtaaatctgaagctttcccaaaataaaaagttggaggaggaaggagacagaatccaggtccagggctgatttgacccactccccatttcaaccaaagaggggctcccgaacctcagatctccgccgtcacgtgtcccactagctagtcctcccgcatggctctcgtggacccctgaacccacgcggaatcctatcctttcagcctggccagcggccccgtcaggacagccgcgtcagaagtctcggaggctgccggtatctcatttcctcgtcagtctccctttccttccacacggtcccctggagtctgccgggaaccatgctcacacccttccactccaacccagccagaccctgacaaccaccccatgaagcggcaccagtggtcctgttttaggaaatcagggaagcaagcttcagggacgtgcctggagtcaccagtcacaggcagagctgggaggcaagcccaggactttagaagacatgctggggacccagggatcctgtgtggccatcacacacctgctagaagcaacaccccttccctagaaaaatgaacctggccagacacagtttcaggggctcctggaccccatatgaaggctcctggggtacgatgagtctcagaggacagggagaccagtccctggcaacccctgcatgcccctactcccccccaagtaaacgcatcccctcccagaaagacctgcggcagggttccagcaatcctacctaacgcactcctgggtgagtccctccacccacccaccccgccccggcattccaatcccctcagttactcagggggattgacagtcccagttggtaggggtttgagttctcatcctgtgcgtgtgctgggctccaagcaatcctggaggcaggcccctacacccccatttcacaggtgaggaaactgaggcacaaagaaagacaatcctaggaagcagggtcagcctcggtgcccaggccgcctctaaagctctcagcctggagaccacgggtgaggaggtgtcccccaccccacacacagcacaccagagcccacctcggcgggcgatctccgccttcagcagcccctccatggcgtccgactcggccaggtccaggggcaggtccccgtcactgttgacggcggcgatgttggccccgtggctcaggaggtacctgggggtgggggctggtcagggctgagggtccaggcccccaccccgaccaggtcctgcccggccctcccttgcctcacctggcgatatctaggtagccacaggaggcggccacgtgcagtggcgtccagccctcgttgtctgcctggttcacagtggcgccctgctccaccaagaagcgcaccacctccaggttctcatcaatgcaggcctgggggtgggaaacagccgtcagccgcacctaccccagccacggtgtcccagcaagtcgggactccagagggagccacgaaaacagatccagggacacggtgctaggacagtggggaaaatgacccaacagcctctggccactggctgtttaagatacgcctggttgcccagtggtcaggccggccaggccttcagtgctcagtggaaaccacgaaaggactcctggctatctgcaaacaggaagtgaacggggaagggagggggcttctcatctgggtgcgggaaccccacatggtacctgttagacacggcaaaacccccgtcaccacccacaggtggcgcttccagtgctcagactagggaagaggttccagcccctcctccttcagagccaggagtcctggcccccagcccctcctgccttaaacccagccaggtccttccaagggtcaagctcggaaaccaccccagcagatactctgcaggaacgaagccgtgggcccagggctatgcagggtggaggaaggccaccctgtgctgggacagactcaggggcctgggcgggactcccagaggggtgagacagctgcacacctgtgtgcctgggccccaggctgtcacactccagttcactgaggccccctctgcacggggccctgcagccaggggctgacacgggccaccgtttctcattcttcccttaggggtccaaaacttggggggacaaaagccgaagtccagggggtcggaggagggacttgccccaggccttgtggacactgggtgggctccgggacctgaactggagctgaggaaggagtgaagctaaactcctagatccacgggataaattaccccccaagtccctcacctctccaaagctgcccatctggaggaggcgggagggagctacgagggccaagagcatgaggtcatggaaactcgggctgtgaaggggccgcacgtgccctgggaacgggatgaactcggctcgtttatttccacccagttgtcatggcgataggggaggggggcaaggagagcaatgggcctttccctttcaaggacctgcccagtacaggcatccctgtgaaagatgcctgaggcctgggcaccagggactccagagtccaggcccaacccctccccattcaacccaggaggccaggccccagcccttccgccctcagatgaaggagtccaggcccccagcctctccccattcagacccaggggtccaggcccagccccgcctccctaagacccagaagtccaggcccccagcccctcctccctcagacccacgagtccaggccccagcccctcctccctcggacccaggagtccaggcccccagtccctccaccctcagacccaggagtccaggccccagcccctcctccctcggacccaggagtccaggccccagcccctcctctctcaaacccaggagcccaggcccccagctcttctctgttcagccctaagaatcctggctccagcccctcctactctagcccccaaccccctagccactaaggcaattggggtgcaggaatgggggcagggtaccagcctcaccaagtggttgataaacccacgtggggtaccctaagaacttgggaacagccacagcaggggggcgatgcttggggacctgcctggagaaggatgcaggacgagaaacacagccccaggtggagaaactggccgggaatcaagagtcacccagagacagtgaccaaccatccctgttttcctaggactgagggtttcagtgctaaaactaggctgtcctgggcaaacagcataagctggtcaccccacacccagacctgacccaaacccagctcccctgcttcttggccacgtaacctgagaagggaatccctcctctctgaaccccagcccaccccaatgctccaggcctcctgggataccccgaagagtgagtttgccaagcagtcaccccacagttggaggagaatccacccaaaaggcagcctggtagacagggctggggtggcctctcgtggggtccaggccaagtaggtggcctggggcctctgggggatgcaggggaagggggatgcaggggaacggggatgcaggggaacggggctcagtctgaagagcagagccaggaacccctgtagggaaggggcaggagagccaggggcatgagatggtggacgaggaagggggacagggaagcctgagcgcctctcctgggcttgccaaggactcaaacccagaagcccagagcagggccttagggaagcgggaccctgctctgggcggaggaatatgtcccagatagcactggggactctttaaggaaagaaggatggagaaagagaaagggagtagaggcggccacgacctggtgaacacctaggacgcaccattctcacaaagggagttttccacacggacacccccctcctcaccacagccctgccaggacggggctggctactggccttatctcacaggtaaaactgacgcacggaggaacaatataaattggggactagaaaggtgaagagccaaagttagaactcaggaccaacttattctgattttgtttttccaaactgcttctcctcttgggaagtgtaaggaagctgcagcaccaggatcagtgaaacgcaccagacggccgcgtcagagcagctcaggttctgggagagggtagcgcagggtggccactgagaaccgggcaggtcacgcatcccccccttccctcccaccccctgccaagctctccctcccaggatcctctctggctccatcgtaagcaaaccttagaggttctggcaaggagagagatggctccaggaaatgggggtgtgtcaccagataaggaatctgcctaacaggaggtgggggttagacccaatatcaggagactaggaaggaggaggcctaaggatggggcttttctgtcaccaatcctgtccctagtggccccactgtggggtggaggggacagataaaagtacccagaaccagagccacattaaccggccctgggaatataaggtggtcccagctcggggacacaggatccctggaggcagcaaacatgctgtcctgaagtggacataggggcccgggttggaggaagaagactagctgagctctcggacccctggaagatgccatgacagggggctggaagagctagcacagactagagaggtaaggggggtaggggagctgcccaaatgaaaggagtgagaggtgacccgaatccacaggagaacggggtgtccaggcaaagaaagcaagaggatggagaggtggctaaagccagggagacggggtactttggggttgtccagaaaaacggtgatgatgcaggcctacaagaaggggaggcgggacgcaagggagacatccgtcggagaaggccatcctaagaaacgagagatggcacaggccccagaaggagaaggaaaagggaacccagcgagtgaagacggcatggggttgggtgagggaggagagatgcccggagaggacccagacacggggaggatccgctcagaggacatcacgtggtgcagcgccgagaaggaagtgctccggaaagagcatccttgggcagcaacacagcagagagcaaggggaagagggagtggaggaagacggaacctgaaggaggcggcagggaaggatctgggccagccgtagaggtgacccaggccacaagctgcagacagaaagcggcacaggcccaggggagagaatgcaggtcagagaaagcaggacctgcctgggaaggggaaacagtgggccagaggcggcgcagaagccagtagagctcaaagtggtccggactcaggagagagacggcagcgttagagggcagagttccggcggcacagcaagggcactcgggggcgagaggagggcagcgcaaagtgacaatggccagggccaggcagatagaccagactgagctatgggagctggctcaggttcaggagagggcagggcagggaaggagacaaagtccaggaccggctggaggggctcaacatcggaagaggggaagtcgagggagggatggtaaggaggactgcatgggtcagcacaggctgccaaagccagggccagttaaagcgactccaatgcggaagagagtaggtcgaaggggaatggtaaggaggcctggggcagagtggtcagcacagagtggctaagcccagggccagttgaagcggctccaattcggaagtggggtggtcgaaggggaatggtaagggggactgggacggggtgtcagcatagggtggcaaagcccagggccaggaacgacggggcggatcgagactggcaacggggaaggaggatgccccaggtggcgcagcagagggtggacctggccccgggagacgccgggcggggggcgctgacctggtgcagggcgctgataccgtcggcgttggtggagtccagcacggcgcgggcgggcggcggcgcggcggggtcgagctcggcgccggggccagggtcggcggcgcgcagcatcagacgcgcctcgtccaggtcgccgcccgcacaggccgccaggaactcggcggcgcgctcgaagcggacggtgcgggcgcggcgctctccggggccaggctcggcgcccgcccgcgccccccactgccgcagctgctcccgtcgccgctcccgggcagccgccgccgccgcccccgggccagccgccgggccatcctctccggacatcgcaccgcccgcccgcccagcgagcgagcgagcgccgagccccaaccgccgccaccacccgcccgcccgcccgccccgggggccgccgggaactgccgctggccccccaccgccccaaggatctcccggtccccgcccggcgtgctgacgtcacggcgctgccccagggtgtgctgggcaggtcgcggggagcgctgggaaatggagtccattagcagaagtggcccttggccacttccaggagtcgctgtgccccgatgcacactgggaagtccgcagctccgaggcgcccagtggaaatcgccagatgagggcctcctccggggaatgctgggaaatggagtctacaggccggaggggtgccccacggcatactaggaagtgtgtagcaccgggtaaaggggatgaatagcagactgccccggggcagttaggaattcgactggacagccgcgtgggagggagtgcggggagaggcagagttgttttgttattgttgttttattttgttttctttgttttgagacggagtctcgctctgtcgccacgctggagttcagtggcgcgatatcggctcgctgcaacctccgcttcccaggttcaagcaattctggctcagtccccagagtagctgggataacaggcgcgcgccaccccgccctgctaatttttatatttttagtagagacgggatttcaccatgttggccatgatggtcttgatctcttgacctcatgatccgcccgcctcggcctgtaatcctgctgggatgacgagcgtaagccaccatgcccagctgggttttatttattttggtttttttcctgaccccttaactagaaataagctccacgagagcgggatcttttgtcttctgtgcactacttgtcctcggttcttagaacagaacctgagagaacctgatcgcaaatatttttggaatgaatgaatgaatgggttcaccagggcaccatgggaaactgagtccgcaacctagaagccatgaaagacagtccacttccaagcttccctgggtgacctcgcagggcatgctgggaaatgaaatttgcggtgaaaaggtcaggaccacgatcctagggcacgctgggaaatgtagcccacagggccacacccctaaaagcacagtggggtgcaaggcagggccccaaggcatttagggctcggggcaagagaaatccacactccactccctaatggtaatccctgagccacaccgagtaaaggaacccaagacacagtgtccacagggacagggctctcagagctttcactggcccgcgcttctcctgcgcccacccggacctcctgggaaccgcccaggccctcgcgcgctctcaaggcatgctgggattggtggtcccgggcaaggagttccagcaggtggggggcgaatcacctttcagcgggcccaagcgatgagcacaccttgatcttcaccttacggatcccgcgcccaactcaagattgggaaggtggctggcactttgtgacaggaagagtcccataaaaatcatacagaaaagggccaaaatcgggacagagactacagactgtttcccaagcgctgtgggagtttcccacccactctgaagtccttgggtttgcgcggagacgtaaactgcgcatcccacgaggcctgtttctttccctctctctttctcttttgttgttgttgttgctgctgctgttacgaaaatttttgtggttttattgtatcatgaggcattgaaacatccggcgactcaatgtctaggcggtgaggcagccgctttctccttcactttctttgggttaagtagagcaacttgtc[169 bp omitted]ccaccacgcccggctaatttttgttttttagtagagacggggtttcaccatgttggccaggctggtctcgaattcctgacctcgtgatccgactgcctcggcctcccaaaatgctgggattacaggcgtgagccgccgcgaccggccagattttttttttttttaaaggacaaccttttgcattacttaagtctttccaaggcatgcgctggtacaacacaaacttttcccattacatgcagctagtctagtgtccagacgtcatgcacaacacctccgtggcatcagcgcactgcgcccactcccactgcgaccctgctcatttgtgcatcatatctggaggagtggcaatagttctggaaagaggagggaagaggaggcagcgtgagggcccggtggagaggaggtcagctgaagttgtgcagagcaagcctgcatatcattggtgcaaacccaagcatcattgcatcgctgatgttttgttttgtttggttttgttttgtttttgagacggagtctcactgtgtcgcccaggctggagtgcagtgatgtgatctcggctcactgcaacctccgcctcccaggttcaagtgattctcctacctcagcctcccaagtagctgggattacaggcgtgctccacgcctggctaatttttgtatttttagtagagacaaggtttcaccatgttggccaggctggtctcgatctcctgacctcaagtgatccacccgcctcagcttcccaaagtgctgggattacaggcatgagccaccacacccagctgatgttctttagtaggaatatctggtggaaccccaagatggggtcttcatccgccacgaagcctgtttctatagaaagggatagttctggtggctcttaggtgtggtccctgaaccccacactttccacatacttacacaccaacctccttcccccaggaaaacaagaagtcggtcttcagggtgttaccgtgtagctctggttctgtatgtattctgtgcctttatgtataattgtgtgtatttgcaatcatgtctgtggctggatgtatgttgtttatgagtttgtgtttatggtttgtttttgtttgtttgtttgtttgttttgagatggagtttcactcttgtcatcgcccaggctggattgcactggcgcaatcaaaaaagagtaaaataacagaaatcagaatgggcttataatactcttacccctctccacacaggacagaagagtcaattttatacttttgtggatgttctaacttcacctgcttatctgaaccatctttatggtgcagactaatatctatttttctgctgttacagaagaagtgggaacattttcttcttatctttctgaggttatttacaccagtgaggagggcctgcagttccaaggttaagcaccaacattccactgttaccattgagagcaaagagcagaccctagaagtgaaaacaaaacctttaccacaggaagacaagagcaaaagatgatgttcttgagtggcatatgaagatgctcacagccaacatcacatgcctatcagatattttatgtacatcatctcatcaactccaggaggcagagactaagagactagccccagtcacagagctagaaattggccaagacaaggttcaatctgaggactgtcaaatccagaactggaatttcttttttttttttttttttttgagatggagtctcgctctgtcacccaggctggagtgcagcggcatgatctcagctcactgcaacctccacctcttgggttc[131 bp omitted]gcctcccaaagtgctgggattacaggcatgagccactgcacctggccttagaagcctcagttcctgatggcagttgggatctgcctttccttccctggactgcctacctcttgtcttttaggttacatatgagaaaacaaacctccaattcaccaaaactattgttatttggggagctgtctcttactatcagccaaacataactcctcaatgacactgttagtttagcactgccattataatcaggagggatctgggtccagctgcgggaacatgaagaggcactagtgggatgaccacagccagcccctgttgattcaccaggagactgcagatgcatgagcaagtccagccaagatcagccagacaagaactcccagcggagcccagcccaatttgccaactctcaaactataatttttttttttttttttgagacggagtctcgctctgtctcccaggctggagtgcagtggcgcgatctcccctcactgcaagttccacctcctgggttcacgccattctcctgcctcagcctcccgagtagctgggactacagacgcctgccaccacacctggctaatttttttgtatttttagtagagatggggtttcactgtgttagccaggatggtctcaatctcctgacctcatgatccgcccgccttggcctcccaaagtgctgggattacaggcatgagccaccgcgcccagccctcaaaccataagttaaatagatgactgttgactcaagccactaatatttggggtaacttttttcttttttctttgctttttttttttgagaccaagtcccactctgtcatccaggctggaatgcagtggcatgacctcggctcactgcaacctccacctctgagggtcaagtgattctcctgcctcagcctcctaagtaactggaattacaggcaccagccaccatgcctggctactttttgtgtgttttcagtagagatggggtttcactatgctgaccaggctggtcttgaactcctggcctcaagtgatccacccgcctcagcctcccaaagtgctgggattacaggcaggggtgagccactgcgcccacctggggtaactttttatgccacaaaagcaaactgatgcaaggcattccaagaggcctttgagcctcttgcaagtcaagctgattgcaagacactctgcctttgataaaatgtagtggacagagaagcagtggtttcagtggcagagatgacaaattgttgcccaatattcgttgtccccttctttctcaacaaaatggaacctctgattatgctgggtttagcatagccatctagaataatggttacatatcccagtgtcgggcctccgagcccaagctaagccatcatatcccctgtgggcctgcacatatacatgaagatggcctgaagcaactgaagatccaaaaaagaagcgaaaatagtcttacctgatgacattctaccattgtgatttgttcccgccccaccctaactgatacgatatattctgcctggtccttaagaaggtactttgtaatattctcccccgcctttaagaaggtactttgtaatattctccctgcccttgagaatgtactttgtacgcccatcccaaacctataagaactaatgataatcccacctttgctgactctgttttcggactcagcccacctgcacccaggtgaaataaatagcctttttgctcacacaaagcctgtttggtggtctcttcacacggacgtgcgtgacatttggtgccgtgactaggatcaggggacctcccttgggagataaatcccctgtcctcctgctctttgcaccgtgagaaggatccacctatgacctcgggtcctcagaccaaccagtccaaggaatatttcaccaattttaaattgggtaagcagtctctttttactctcttctacaacctctctcactatccctcaacctctttctcctttgaatcttggcgccacccttcagtctctcccttctcttaatttcagttcctttccttttctggtagagacagaggagacgtgttttatacgtgaacccaaaaccccagcgctggtcacggactcgggaagacagtcttcccttggtgtttaatcactgcggggacgcctgcttgattattcacccacgtttcagaggtgtctgatcaccacggggacgcttgccttgatccttcacccttagtggcaagcaccactttcctggggggcaagcaccccccaccccttctctccatgtctctactctctcttttctctgggcttgcctccttcactataggcaaccttccaccgtccgaccctccttctcccttagcctgtgttctcaagaacttaaaacctcttcaactcacacctgacctaaaacctaaacaccttattttcttctgcaatgctgcttaaccccaatacaaactcgacaatggttctaaatagccagaaaacggcaattttgatttttccatcctacaagatctagataattcttgtcgtaaaatgggccaaaggtctgaggtacctgatatccaggcattcttttacacattggtccctccctagtctctgttcctaatgcgacttgtcccaaatcctccttctttccctcctgcctgtcccctcagtctcaaccccaagcgtcactgagtcttttcaatcttccttttctaccgacccatctgacctctcccctcttccccaggctgctcctcctcaggtcgctccccaccaggctgaatcaggctccaattcttcctcagcctcctctcccccgccctataatccttccatcacctcctctccccacacccgatccagcttacagttttcttctgcagctagccctcccccacctgcccagcaatttcctctgaaagaggtggctggagccaaaggcatagtcaaggttaatgctccttttcctttatccgacctctcccagatcagttagtgtttaggctctttttcatcaaatataaaaaccccgcccagttcatggctcgtttggcagcacccctgaggccctttacagccctagaccctgaagggtcagaaggcctcttattctcaatatgcattttattacccaatctgctcctgacattaaataaagctccaaaacccccacaacaggacttaattaacctcgccttcaaggtgtacattaatagagtagaggcagctgcatagcaacatatttctgagttgcaattccttgcctccattgtgagagaaaccccagccacatctccagcacacaagaacttcaaaatgcctacgccgcagtggtctagcattcctacaggacctcctccatcaggatcttgcttcaagtgccagaaatctggccactgggccaaggaatgcctgcagcccgggattcctcctaagctgtgtcccatctgtgcaggaccccactggaaattggactgtccaacttgtccggcagccactcccaaagcccctggaactccggcccaaggccctctgactgactccttcccagatcttcttggcttagcggctgaagactgacactgccccatcacctcggaagcctcctggaccatcacagatgctctgggcaactcttacagtggagggcaagtctgtccccttcttaatcaatacggaggctacccactccacattaccttcttttcaagggcctgtttcccttgcctccataactgttgtgggtattgacggccaggcttctaaacctcttaaaaccccccaactctggtgccaacttggacaacactcttttatgcacttctttttagttatccccacctgcccagttcccttattaggtcaagacattataaccaaattatctgcttccctgatcattcctgggctacagccacacctcattgccacccttttccccagttcaaagcctccttcacatcctccccttgtatctccccaccttaatccgcaagtatgggatacctctactccctccttggtgaccgatcatgcaccccttaccatcccattaaaacctaatcacccttaccccactca[185 bp omitted]gtggcgggcgcctgtagccccagctactcgggaggctgaggcaggagaatggcgtgaacctgggaggcagagcttgcagtgagccaagatcgtgccactgcactccagcctgggcgacagagcaagactccatctcaaaaaaaaaaaaaaaaaaaaaaggttaaagcctgttatcacccacctgttacaacatggtctcttgaagcctacaaattctccttacaactcccctatcctacccatccaaaaccagacaagtcttacaggttagttcaggatctgtgccttatcaaccacattgtcttgcctatccaccccatggtgccaaacccgtatactctcctatcctcaatacctccctccacaacccattattctgttctagataaacctagctgaccccataaatcctaaatcctttccccact[132 bp omitted]aaccccatctctactaaaaatacaaaaaattagccgggggtggtggcgggtgcctgtagtcccagctactcaggaggctaaggcaggagaatgacatgaacctgggaagcggagcttgcagtgagccgagatcgcgccactgcactccagcctgggcaacagagtgagagactctgtctcaaaaaaaaacaaaacgaaacaaaaaaacaaaaaaaaacagccctaaaagctgctcccacactagctgtccctaactcatcccaacccttttcatcacacgcagctgaagtacagggctgtgctctcagaattcttacacaagagccaggaccgcgccctatagcctttctgtccaaacaacttgaccttactgttttagcctagccctcatgcctgtgtgtggtggctgccgctgctttaatacttttagaggccctcaaaatcacaaactatgctcaactcactctctacagttctcataactttcaaaatctattttcttcctcatacctgatgcatatactttctgctccccggctccttcagctgtactcactctttgttgagtctcccacaatcaccattgttcctggcccggacttcaatccggcctcccacattattctggataccacacctgaccctcatgactatctctctgatccacctgacattcaccccatttccccatatttccttctttcctgttcctcagcctgatcacacttggtttattgatggcagttccaccaggcctaatcgccacacaccagcaaaggcaggctatgctatagtatcttccacatctatcattgaggatactgctttgcctccctccactacctctcagcaagctgaactcattgccttaactcaggccctcactcttgcaaaaggactacgcgtcaatatttatactgactctaaatatgcctttcatattctgccccaccatgcagttatataggctgaaggaggtttcctcactacgcaggtgtcctccatctttaatgcctccttaataaaaactcttctcaaggccacttctcttccaaaggaagctggagtcattcactgcaagggccatcaaaaggcatcagatcccattgctcaggacaacgcttatgctgataaggtagctaaagaagcagctagctttccaacttctgcccctcacggccagtttttctccttcacatcggtcactcccacctactcccccactgaaactgccacctatcaatctcttcccacacaaggcaaatagtttttagaccaaggaaaatatctccttccagcctcacaggcccattctattctgtcgtcacttcatagcctcttccatgtaggttacaagccgctagcccatctcttagaacctctcatttcctttccttcgtggacatctatcctcaaggaaaccacttctcagtgttccatctgctattctactacccctcagggattgctcaggtcccctcccttccctacacatcaggctcggggatttgcccccgcccaggactggcaaattgacttcactcacatgccctgagtcaggaaactaaaatacctcttggtctgggtagacactttcactggatgggtagaggcctttcccacagggtctgagaaggtcaccacagtcatttcttcccttctgtcagacataattccacggtttggccttcccacctctatacagtctgataacggaccagcctttattagtcaaatcacccaagcagtctctcaggctctcggtatttagtggctcctggttttacctcaaatcgccttaagtctctcttgaagtggatagatcttcagtggcaaggtaccctccaatactttcaccctgatgaagtcctattctttacttctatgctcactgttattctggttcccattctttttttttttttgagacagagtcttgctctgttgcccaggctggagtgcagtggcgcgatctcggctcactgcaagctccgactcctgggttcacaccattctcctgcctcagcctccggagcagctgggaccacaggcgcccgccaccacacccagctaattttttgtatttttagtagagatggggtttcactgtgttagccaggatggtctcaatctcctgacctcgtgatccgcccgcctcagcctcccaaagtgctgggattacaggggtgagccaccacgcccggccttggttcccattcttatgccatcctctacctctccccagctatctccaccacactatcaatctcactctctcccagccatttctaatcctcctttaacaaacaattactggctttgcatttctctttcctccaaaattgccaaggcctcgacttactcactgctaaaaaaaaaaaggactctgtatatttttaaatgaagagtgttgtttttacctaaatcaatctggcctggtatatgacaacacaaaaaaactcaaagatagagccccaaaactcaccagccaagcaagtaattatgctgaacccccttggacactctctaattggatgtcctgggtcctccgaattcttagtcctttaatacctgcttttctccttctcttatttggaccttgtgtcttctgtttagtttctcaatttatacaaaaccgcatccaggccatcaccagtaattctagaaggacaaatgctccttctaacaacccccagtatcaccccttaccccaaaatctttcttcagtttaatctctcccactctaggttcccacgctgccccaatcccactcgaagcagccctgagaaacatcgtccgttatctctccataccacccccaaaaattttcaccgcccgaacacttcaccactattttgttttgtttttcttattaatataagacaggaatatcaggcctctgagcctaagctaagccatcatatcccctgtgacctgcacgtacacatccagatggcctgaagcaaccgaagatccacaaaagaagtgaaaatagccttaactgatgacattccaccactgtgatttgttcctgccccactaactgataccatatattctgccccacccttaagaaggtactttgtaatattctccccgcccttgaatgtactttgtacgcccatctcaaacctgtaagaactaatgataatcccaccatcctttgctgactcccttttcagactcagcccacctgcacccaggtgaaataaacagccttgttgctcacacaaagcctgtttggtggtctcttcccacagacgcacgggacaccagcatccctaccaactgggtatgataatgtaattaacttctgtcaatgagactgagtaggagtaaacatgtctccttccattttaccccagtctgcggtctgaaacagagtgggaactatcttaccctatgggcaaaggcaaccccctggggaaaggagctacacagtaggatgagcttggacccaggcaatgttacaaaacagagccatcatcccaactcagacttttacatgtgaaagaaatcaactattgtcagccaggcaaagtggctcacacctgcaatcccagcattttgaaaggctgaagcgggaagactgcttgagcccaggaggttgaggccgcagtgagctgtgattgcaccactgcactctag[225 bp omitted]ggaggctgaggcaggagaatcgcttgaaccagggagtgggagcttgcagtgagctgagattgcgccactgcactccaacctggtgacagagcgagactccatctcaaaaaaaaaaaaaaagaaaaagaaaaagaaattaaaacaaaaaaagaaagaaagaaaaagaaaatcaactgttgtgttggtccatttgggctgctgtaacagaacaccgtagacctggtcatttacaaacaatacaaatgtattgctcacaggtctgtaggctggaaagaccaggatcagggcgccagaagactcagtgtggagggagggcctgctctctgcttcacagatggtgccttcttgctgtgtcctcacacagccaaaggggcaaggggctctccctcaagcctcttttataaggacattaaccccatttgtgagggctctgccttcatgacctagtcacctcctaaagtcccgtggaatactattgcattcatgatcaggtttcaacatgtaaattttgaggggatacatacattcaaagcatagcaactgtctggttatttgggatttagggcccagtggccagacccacatggtcactaataagacatcccaaatggaaagtcggaaaggcagaacagcaaacaatacttattgtcactgaactgactctcccatacgaaactttacgtgtcactttttaaatttacttttgcattgtgtgtgtgt[136 bp omitted]tcagcctcctgagtagctgggattacagccaccactatgcccagctaatctttttttctttttttttgtaatttagtagagatagggtttcctcgagttggccaggctggtcacaaactcctgacctcaagagatcctcctgcctccagcttgcagtgagccgagatcacgccactgcactccagcctgggtgacagaacgaaactctgtctaaaagaaaaaaaaaagagatcctcccgcctctgcctcccaaagttctgggattacaagcaggagtcacctcgcttggcctgcttttgaatttcttaatttggatatgcttaacatatcataagatgtaccaactaaagtacaattcagagtttttcagtatattcacgttgtgcaaccatcaccactatctaattccagaacatgttcatcatcgaaaaagaaacgccattctcttagccgtcatctctacccaccgtcccctagcccctcaaaaacacgaacctccttcctacttctgtggatttgcctattctagaaaattcatataagtggaatcatatgtgacctttgatgtctggttcctttcgcttagtatgttttcaaggttcgtgcgtgtcacaccacatgtcagcacttcattcctttccgtggctagacaacattccactgtgtggatgaaccaacgtatgtttatccgttcatcagttaatgagcatttgagttgcttctgccttttggctattatgaaaaactagcggtgggccaggcgcggtggctcacggctgtaatcccagcactttgggaggctgaggcaggcggatcacctgaggtcaggagttcgagaccagcctggccaacatggtaaaatcccgtctctactaaaaacacgaaaattagctggcgtggtggcaggcgcctgtagtcccagctactcgggaggctgaggcagaattgcttgaacccgggaggtggagg[138 bp omitted]ggcgggaggatcagctgaggtcaggagtctgagaccagcctgaccaatatggtgaaaccctgtctctactaaaaatacaaaaattagccaggcatgttggtgggcacctgtagtcccagctgcttgggaggctgagacaggaaaattgcttgaacccgggaggtggaggttgcggtgagccgagatcatgccactgcactccaggctgggtgacagagcaagactccatctcaaaaaaaaaaaaaaaaaaagatgctgcggccggtgcagtgattcacacctaaaatcccaacactttcagaggctgttgtgggaggatcacttgagcccaggaattcaaggctgcagtgagccgtgatcacgccactgcactgcagcctgggcgacagagcaagaccctgtctctaaaaattaaaaataaaaatgctactatgaacattcatgtacaagcttttgtgtggacaaaggttcttggttctcttggatatacatccaggaggggaactgctgggtcctgcagaaatgctttcacttgttgaggaaccgccaggctgcttgcaaagctgttgcattttccattcccaccagcagtgtgtgaaggttcagcctgccgtactttaatgattattggtgacactctttcaagtaacttgttggtaataagaagtcaattaaccaggagagaccagctgcatctcaaccataataacatcagagaacccagcgggtgtctgaggggagcgtttatttcaagctaccgatgggacaaacactcccaggcttcccaggtgccactgtccggggcggcatcctcacttccagcggcctccaacgcggcccttccctgcccccttccggctgtagaagaatgaggtggtatcaggaaaaaggggcccctccagtctctgaaatgggccccaggccctcaattcaggaagcccattccccaaaatattagccctccctgcccagaggaagcagtgagcaaaacaactgtcacctcttttgggttctatgactggggggcagcggctggtggtcaaagcctcgctgacatgtgggagctgatatttgggggcgagtgcagggtgttcatgggggagctgatgaatgtttatgagtcaggggccagggtggggggaggaagggttggatgatctgggcatgggtgggtaacacgcaggaagggctggggtgaaagagacaggaaatgggagaagaggagaagggagagggagaggagggaggaagga[223 bp omitted]gaggcaggagaatcgcttgaacccgggagatggaagttgcagtgagctgagatcactccactgcactccagcctgggtgacagagcgagacgcagtctcaataaaaaaaaaaaaaaagaaagaaaaagaaaaaggaactgagacccaggattccgagagcagagagaggaggacagagaaggaaggacaaagagaaaggggcagaaactcaggcagtgggggatggagcccacagagggagggaaagaggcctgagagtcagcgggagggtagggacaagagcaagggcttgagacggtcacactcacaacttctgggcgtggctgatgcggttgtacagcacgttgatctgcggaggcagaagacagatgctgggacagccggtggggacgtggggacgggccacccacccctgcctggagtttgctggtccctcccagcccagccctgccctctctccctccctccctgcggagctgggtctcacctcatatttctgctgtttcagcttcgccatcaggtcgaacttctcagactccagctggtggatccagtccgacagctcctgggctttctccctggcagggcaggagggctgtgatggaggcagccaggcagaccgggccctaggcccagggacggagaggaacttgggcccagagaggttgtgggaaccacccaaagccacacagcgagactgtgagttcagcgttgtcggcaccattttgttcatatttgaggccgagagttttaaaatctgtgcccactttctccacatccgagctggagctctcgcatttcccaaggggagagaagggtgtcatgattaagagaccaggctcggcacctgtaatcccagcactttgggaggcagaggccagcagaacacttgagcccaggagttcaagaccagcctgggcaacaaagagagaccccgtctctgctaaaaataattaaaaaaattagccaggcagggtgtttccggctacttgggaggctgaggcagaaggaacctgggaggtcaaagctgcagtgagctgtgattgcaccactgtattcctgcctggcaacagagcaagacaaaagaaaggaaagaaaaggagaaaggaaagtggggaggggaggggagaggagaagaggggaggggagaggagaagaggggaggggagaggagaagaggggaggggagaggagggaagaagaaggggagggagggaggggaggggagacgaggggaggggaggggaggggagacgaggggaagggaggggaggggagaggggaaagaaaaggaagaaagaaaagaccgagcccaggctctgcagttagaagcccctggttcaattcccagccatgccattctctggtttatgaatatgtcacatgacttcctttagaatcctgtttccttctctagaaaatatggaaataaaactgtggaagagatggctgcttgcctacctgttagcccttctccctttcttctagaaatagcctcttgtgcattaggctgagttgaaaaactactttgcccaatctcccttgcaggtaggggtggctactcagacgaaagcaggtcactgggtgcggcttccaaaagagactgtgtggctcttctcttgcgtcttctttctgctgcttggatcatccatgtgaggctggagctagcagctatattggactaagtgattttgaggatggaaatattgggctaaaagtagtgagtgaagcagaaaacataggagtctggtctctgattttgtagaattgccataccagccctggactaaaacctacctttccttccttccttccttccttcttttctttcttttcttttttttttgatagggtctcactttgtcacccaggctggagtgcagtgacaccatcacagctcaccgcagtctcaacctctcaggctctagtgatcctctcacctcagcctttttttttttttttttttaagacagagtttcgctcatgtcgcccaggctggagtgcagtggtgccatctcggctcaccgcaacctccgcctcctgggttcagtgattctcctgcctcagcctccagagtagctgggattacaggcgcctgccaccacgcccggctaatttttgtatttttagtagagatgggatttcatcatattggtcaggctggtctcctgacctcaggtgatctgcccgcctcagcctcccaaagtgctgggattacaggtgtgagccgccgcgcccgcccggccaacaatactttacatgaaccatgtgcacaggaaggagggcccacagcgccccccagagggcttccaggagcctgctgtgcacatcctttcccgtctccacactcagtgtccccacacgggtagtttgaaaggagcaaggtggaagtatttacgccctgggaatgggcatgtgctaaatctagacattttgccccctggagagcagctgttaaacatttaccatgaagccactttacagcacactagcaaagagtacggactattgcaccagactgccgggttcaaatcccagctcttccacttgctagctgtgcaaccctggaagggttacttaacctctctgtgcctcaggttcctcactattaacacaaggataataatagtatctacctcacagggttgtaaaccctccacaggaagctgctgctgtaattattatttttttaaggatggggtctcactacattgcccaggctggtctccaactcctggcctcaagcaatcctcccatcttagcctcccaaagtgctggaattacaggcatgagccaccgggcccagcctgtaattattattactatctcactgccctttcacagctctgtgaggtcaattttgtgattatatccttgttctgccaatgaggaatgggagccccagagaagtcagataacgtgcgcaagatcacaaagtagccggcaaagctggcactgagccctgggcaggggctttcggtgcaagcggcaaacccgatcacggcgccactctggggtggttgaagtttctgagccacagcccaggccagagaacatggagaaacaggcgggctcctgaaggcaagcccccaccagcctgccgtcctgtagcttatcatgagaggcaggctgtcttggctatagatgcgagggactcagctggaaaattctcacccgcattcctggcttgaatttaggtaaaaggcacagcccatcctgagctccaaggcacatcacggagttaacaaaatctcctaaacttgggggagggaagtcatcttgtctggcttccttggtaacacctgtcagatgctacaggccacggcagccacgaaaagtgggttcagtgacatgtttcacaaagaaggcagcagaggcccagagaggggaagccacttgcccaaagtcacatagcactggagctgagacccggagtatctgcccacccagatctgggtgtgagctcctttatccccctgtctcacacccaggcccctacaccccgagccccccacagcacctaccggagctgttcctcccccatgtagtcaatgtccagaggcttcttacgctcggagaggatgcgcaccttcatctcccgccccgtctgccgcttaccacgcttctgttctgcctgagggtgggggaggcggaacagtaaactgggggccacatcccacagagcactgccgtgtcgggacccacacgtcggatcccacagaccatttccatgttgggaccacaggtctgcaccccaggcccatctccttcagacctaggagtccagccccactccctcctccctcagattcaggaggagtccagacccccagtcccttctcttagactgagtccaagccccagaccctctcgcattaggaaccagaagtctggcccccagcccctcctccctcagcccaggagtccagaccccagcccctcctccctcagacccaggattgcaggccccgagcccctcctccctcagacccaggagtgcaggcccccagcccctcctccctcagacccaggagtccaggcccccagcccctcctctcagactgagtccaagccccagaccctctcgcattaggaaccagaagtctggcccccagcccctcctccctcagacccaggcgtccaggccctcagcccctcctccctcagcccaggagtccaggaccccagcccctcctccctcagacccaggcgtccagaccccagctcctcctccctcagacccaggagttcagggcccagcccctcctccctcagacccaggaatccaggcctcagcccctcctccgttaggaaccagaggtctggcccccagcccctgccccctcagaactcagacctcaggctcctgcaggctgactcaccttgaccaggtagccgccaaaatgggcccccatgttggacagcaccttctttttcttggcatcatcctctgcccgcttcttggcctcttcctcttccttcctcatcttctcctcctgtgggaagtaaggggttaacctcatggactcccctgtaggactgagggaggagggccctgggatgtggaactggggcacagggatcagcagacccagtgccgcagaggctgctgggacatcagaaccagcagaaacgcaggggtacccactcccggccctgccacgtctccccgtgtgaccacctacaagtcccttcccctctgtttttttttttttttgagacggactctcgctctgttgctcaggctggagtgcagtggtgcgatcttggctcactgcaacctccgcctcccgggtttaagcaattctccagcctcagcctcctgagtagctgggattacaggcacccgccaccgcgcccaactaatttttgtatttttagtggagacgcggtttcaccatgttggccagg[138 bp omitted]agaagaaatgcctgctttttctgcatgtctccaccctgaaatagccgatagtgaactctgctgtacgacctcactccagatgctcagcctgtctgggccacagtcgcccttagtctcaggatatgagaatgtctgttttgagggggtcaagggaagtaactggtgataagaccagggactggggagattaaagaggctgatggccttgagcctgaggaaggggttctggaatattgagcgaaggcattacgacattcgagaaactcttcattgaatgttccagaaacagtggtttgtccaggctgagccccgtctccttatggtggacatgaggctttttgtacacccagcactccgtacctgaattagtttcctttctgtttttgagatggagtctcgctctgtcactcaggctggagtgcagtggtgcaatctctgctctgttcactgcaacccccacctcctgggttcaagtgattctcctgcctcggcctcccaagtaactgggattacagacatgtgccaccattaccagctaatttttgtatttttagtacaaacagggtttcaccatgttggccaggctggtctcaaactcctggcctcaggtgatccacttgtctcggtctcccaaagtgctgggattacaggcgtcagccatcgcgcctaaacttagtttcctatcactgctgtaatttgcaaatttagtggcagaaaaacaatgcagatttgttatcttacagctctgcagatcagacatctgaaattggtccccctgggctggaatcaagttgtgaacagaaccaatttattctggaggttctaggggagaattcattcccttcccttttccagctgctgcctgcatgtctgggcccatggaccttctttcatcttcagaggcagccatgcagcatcttcaaatctctcagtctgaccctctggccttcctcttataaggacccttgtgatgatcttgcccttccccacaggtaatccaggacaaccttcccatctcaagatctttaatttaatcacatctgcaaaatccccttcacagctgggtgacgggcaggtggctgtaatcccagctactcgggaggctgaggcaggaggatcacttgagcccaggagtttgggaacaacgtgggcaacatagaaagaccctatctcaaataaaaaaaaataataataatagtaataatgatgacaatggccaggcatggtggctcatgcctgtaatcctagcactttgggaggccaagggggtgaatcacctgaggtcaggagttcaagaccagcctgaaccaacatggagaaaccccatttctactaaaaatacaaaaattagccgagcctggtggcaggtgcctgtaatcccagctactcaggaggctgaggcaggggaattgcttgaaccaggaggcggaggttgcagtgagctgagatcgcgtcactgcactccagcctgggtgacagagcgagactgtctcagaaaaaaaaaaaattaaaattaaaaaaaaagggaaaagaagaaaatggagaatccaggccgggcacgatggctcatgcctgtcatcccagcactttgggaggtgaaagcaggtggattgcttgagcttaggagttgaagaccagcctggacaacatggcaaaatgctgtctctacaaaaaataaaaaaataaaaaaaactagtggggcagagtggcgcagcctatatagttccagcgactctggaggctgaggtgggaaaatcatttgagcccaggaggtcctagttatagtgagctaggatcacaccactgcacttcagcctgggtgacagagcaagaccctatttccaaataaacgaataaaaaataataataggccggatgcggtggctcacacctgtaatcccagcactttggaaggctgaggtgggcggatcatgtggtcagaagatcaagaccatcctggccaacatggtgacaccccatctctactaaaaatacaaaatttagccgggcgtggtggtgcgcacctgtagtcccagctactggggaggctgaggcagaagattcgcttgaacctggaaggcagaggttacagtgagctgagatcgtgccactgcactccagcctgggcgacagagctagactccgtttcaaagaataataataatagtaataataataataataataataataacaaaatgggcatccggctgaagaagtaacatttgggctctcagggcaggggaggcacccaccgccagcttagcctgacgttcgcgttccttctcagttctgaagcgctgttgctcggctctctctgaccggcgccgctcctgggaaacggagaagcataagggggtgcagggacgtacccccagtcttccttccccagagtaggctaataaacagattggagtgtggccaccgacttgggtgaattcgcgaaagcctaaggctcagctctgtactaggaggaaaactattatctgcatctcccaagatgcaagggatccacatggagggaggaagaccggggggaacccggactctcggctcacaatgcgctccttcaaggcaaccagctcctcttcctccttcttccgctgctcgaaatgtacatcgatgagtgtctgcagctccagcaggtctttctccatgcgcttgcggtggatgtcctgcaggacacacgggcagcccgtcctaggagaccctggagggggcagcagcctcccagcacctcccccatgcaggatggtgaactgaaccgtttcccaggacggtatccagcaggtggcagcaatgcctcgtgtttgacactaatcagctcttccaaggacaggcttcccaaagacgggagtggggagtggggaccggcgcctttttttttttttttcctcccaggctggagtgaaatggcgcgatctcggctcaccgccacctccgcctcccaggttcaagcgattttcctgcctc[134 bp omitted]ctcccaaagtgctgggattacaggcatgaggccccgcgcccggccggcgccttttcatgattgacacaaaggccccttaaagactagcaactgcgcctgcggaggggtctcttgtcacttacatcgaagtcaacgcgctccccttctgggatctttggcgggatcaaaggaggcaccacggggcggctgagtggacagaaacacagagaccatgagtggcccgacctccctgagccacctcccacctccgggatgtgccgtccagtgaggtagccgccagccccgggaggctcctgaacgtggagggtcccagctgaggcgggctgtcagtgaaacacacaaaagaaggtaaaatacctcactactcatgtttttttggttgttgttggttttgttttgtttttttgacggagtcttgctctgtcacccaggctggagtgcggtggcgccacctcggctcactgcaagctccgcctcctgggttcacgccattctcctgcctcagcctcccgagtagctgggactacaggcgcccaccacc[138 bp omitted]cccggcactaatcatgttttatactgattacatgttgaaatgataaaacattatataacagattaaaaaaactgtgctatgaaaattaatttttcctatattgttgtactttaaaaaatatgcctagtaagaattttttttttttttttgagacagagcctcactctgtcacccaggctggaatgcagtggcgccatctctgctcaccacaacaacctccacctcccagattcaagcgattctcctgcctc[134 bp omitted]cagcctcccaaagtgctgggattacaggcaggagcccctgcgcccagccatttttaaattttttgtagagatggcgtttcacagcctgggcgcggtggctcacgcctgtaatcctagcactttgggaggccaaggtgggcgaatcacttgaggtcaggagttcaaaaccagcttgggcatcatggtgaaaccccatctctactagaaattaaaaaaaaaaattagctgggcatggtggtacgtgcctgtaatccctgctactcaggaggctgaggcaggagaatcgcttgaaccccggaggcagagattgcagtgagccgagatcgtgccatcgcactccagcctgggtgacagagggagactctatctcaaaaaaaaaaaaaaagagatggcgtttcactatgttgtccagggtggtcttgaacttctgagctcaagtgatcctcccgcctcagcctcccagagtgctgggactataggcgtgagccactgcgcccagcctttagtaagaaattgtaagtgacgtgtgtggcttgccatctatttctattgggtggtgccgctctgaggctcagccctcagcctgctctgatttcctgccacttccttggaattctcttttctgggtttctgagacagtgaagagcgattccaagatgaagcagacaggacttaggggatgctgggcaaggggagggaagaggtgaggacaatccccaagggtctctgggccagggggccaagtgtacagcagggccgtcatctccatcttggaaaagtcgataagctccatcagggcgtcatgtgtgggaataaaatatggcttaccatattgtacaggaatgaataccggcttgcctcccacccctctggctgttccatccctatctcctgccccgacagccccgtgagctgccagtgagctttccttttcccttttctcatcatcaatgccattcactccaatgacttcaggtatcatcaactgctgaggactcgccaactgtctctggtccagactctctcctaagccccagactcaagctaacaggtatctcctgaacttttcccaccttcccacacatgacgtcctgatggagctcaccaacttctctgagaaggagatggcagccccactgtccactttgttccccagcccagagacccttcggggttgtccccattgcttccctccccttgcccaacaatccccaagtcctgtccctttgccttggaatccctctcagtccattcccccaccccaccccaccccctttttttttttttgagatggagtttcactcttgttgcccaggctgccgtgcaatgacacgatcttgactcactgcaacctctgcctcccggttcaagcgattctcctgcctcagcctcccaaatagctaggattacaggtgcccaccacaatacctggctaattcttttgtatttttagtagagacagagtttcaccatgttgaccgggctggtctcaaactcctgaccttaggtaatccgcccccctcagcctcccaaagtgctggaattacaggcatgaaccactgcgcccggccccattcccttatttttatttatgttttagagacagggtcttgctctgttgcccaggctggagtacagtggtgtaatcatagctcactgcagcctccaaatcctgggttcgaacaatcctccttcctcagcctcctgagtagctggaatcacaggtgtgtgccactgtgcccggctaattttttaaaattttttgtagagatgtgggggatctcattttgttacttaggctgatcttgaactcctatcctcaagtgatcctcccacctgccgctgcgcaggcagagggcacagtgtgtgcaaaggctcaggggtatgaaagcacaggcatggctagagaaccatgaaacgctgtgtgtctgtcagtggggaaggcagatgccggaaaggtccgctggagccagatggggaaggctttgaatgcaggctagttgctttgactgcgtcttaagagtagtggggagttgaggaaagattctgagcagaggaggggcagggttagctctggtgttagaaaagtctctctcgagtcatggaggaggatgagccacaagttgtaggcagggaggccagagaggaggctggggtgatggtaaaggcgcgaggggaagagggaccactgggtggaaagaaggaaacagactggctgggcatggtggcttgcgcctgtaatcccagcactttgggaggccaaggtgggagaactgcttgaggataggagttcaagaccagcctaagcaacatagcaagacctcatctctacaaaaagaaaaaaaaaaaaaaaaaccaggtgtggtggcacatgcctgtggtcccagctactcaggaggctgagatgggaggattgcttgagcccaagatgttgaggcagtgggccaggattgggtcactgcactctagcctgggtaacagggtggagactatgaccacgatgaagaagaaggggaaggagaaggagaaggggaaggggaagaagaggaagtggaggaggaggagggaggaggagggagaggagggaggagggaaagggggagggaggaggaggaggaggagaaatgtcgactgctgtttcaatttcctccctccatctctgcctttctcacaccttgtctctgggggtagagggaatatttaggaagatgtatgactggggccccccaccctgtaggatctcaccttggtttggggcgttcctcttctgttggtggtgggggataaaaagagataattagcaagagtttagaggagaggggctaggcctgacacaccctggggagggaccccccaagcctcggcccccaggaccccagggaaggactctggagtccagttctggaggaggggggatggggagaagaaaagagggaaggaaagtcagggtggctgtaaaggaggaagagggtcacacgcatcagatatacattcagaactggtgtggggaccccccacccccactgtctgcacacccaggagtgcaaacccccagacctttctctatttatatgcccagagctcctgctctcctccattaggacccagcagtgcagggggtcccaacctctgtcttcattcagtgaccccagcgctctctccccagctcgccccctgcccaccgccccaccgcccccccgcccccggcccgaccttggagaccctgactcccagcgctcgcctcctctgcaatcctaaattccaagccccaacctttgaatgtatatgggggagaaaataacagacaaggttggaggcgaagataaggggggatggggtggtgcttctccgcaaacatccaacccttctgtaaagattcctccagactggggaagaaggcttgggtgtcggtccctttaagaaggaagggaaagggttaaagccactgcggggccatttcccttcccggccccgagagggcgcaggagctctcaggggcttaaaggaccgggcctgggggcgggttatgggggcggagggagggaagggtggtcttggaggttggggcccgaggatatcgggggtccccccgggcccccgacatcggtctcgggaagcgaagcagccgcggttacctggctctgccaccggctccggctcttcgggggctggggaggggagggaggagcagcgagggtttggggagcgaggggggagcggccacgcccgggcgcgggaggggagagagggaagagacgtgagaggctgttagaggaccgggagccgaggccgtcgggagccccatcccgccccctcctcccgggcccagcgtccccgcccccccaccccccagctccagacctgcggagtccgggacctcaccttcctcctcctcctccgcagcctcctctggagatgggggcacagaagagaaggcgttaggagctgggggagggatgggggcggtggccagagaccagggttccagtctctgctggacgggggtccctctggcctcggctgcgatgggcacgttccccctggcggtgcagggatggcgcgaggagacgctccagacccggagagggcgggcgagggcccgagggctgagccgccccttccccgccaaagtgccacactcctcgcctcccctcccaagagctcctgggcgtgtccccatcccatagggccggcccactccctactcaccttccggctgctccctgcggacgggtgtggggagagaggagggaggggagagttagacctggggtgggagagcctctccaccactgcacgccccaacccctcccagtgcagcactcactcctcatattcctgctcctcggtgtccgacatcctggtgcggcctaaggaccagagagaagaggcccagtggggtggggccccaaggagggggcgacctagactcctgggtgtgagggaggaggggctgggggcctggactcctgggtctggactcctgggtgtgagagaggaggagctggggtctggactcctgggtgtgagagaggaggagctggggcctggactcctgggtctgaggaaggaggggctgggggcctggactcctgggtctgagggaggaggggctggggtctggactcctgggtctgagggaggaggagctggggcctggactcctgggtctgaggaaggaggggctggggcctggacttctgggtctgagggaggagggactggggtcctgaactcctggatctgagggaggaggggctgggggccggattcctgggtctgagggaggaggggctggggggtgtgtgggagggtgggtgtggactcctgagactgagatgggttgtcctggacacctgggtctgagggaggaggggctggggtctggactcctggatctgagggaggaggggccaggggcctggacgcctgggtctgagggaggaggggccgcgggcctggacgcctgggtctgagggaggagggtctgggggcctggcctcctgggtctgagggaggaggagctggggcctggactcctggatctaagggaggagaggctgggagtctagactcctgagtctgagggaggagcgggctgggggcctgtactcctgcgtctgagggaggagggctcaggtctggactcttgggtctgagggagggggccggctgtcctaaagcatgcatgaggacagaccttggtaggtgtggtcctggcacagccaggaggctgcagaccctgccccctcagcacagctgtcctcttttgtcttatgacaagtccatgggaacctgatccagttgggattaggaagaggcatttgagaagggacagtggcctgaagacaatagctgccccacccccaggagctattttggggggatgtcatagatggtgaaaccgaggacatttcctaagaagggatttgaggaaggggggcttctgggagaattagtcacccgcatcccctctcccactcgccccaccccactggctggtttcctccccacctgtctcccctttcaccttcccatacatcacgtagggggcaggggcataaagggcaccttctgtccgtagacctcaccctgacccctacattcttagacctcaaagtctttgagacaccctaggccacagggtgcctagccccaaatcccaatacccacagattctgagaccccgatttatgatgcccgtgtttctgaggccagcaagtcctcacagctctggattctgaaatcccagttcttgatagtccagatatgggccgggacatcctaagaccacccccaggtcttgagacctcctaaaatctgaaacctcaagaatatgagacccccaaaatcttgatacccaaactcggaggcccagttcatgataccccagataatggcactctaagttttcatgctttctatcataatgtctcagattccgagccctccactaccaaaaccccaatttcttctgagacccccccaattcctgataccctcagagtctgaggccccaaatcctgacacccagattgtttgacctccaagtccagatatccctgactgctgagatttcccccagattcccagaaccccaagatcctaggaggttttattctgggacatccaagtcctggcagccccgggttaggatttgtgtaacccacaaatcctagtattttcccctctatcctgagtccccctaaagtctgagcctctcaagttcccagacctccagttgtatgccccacctacctctgcaccatttctccacacccgacatcttccccacctgcctcctgccccctcccccaaggacatggtttttgaagaccacagggctccgcagagccccttacctaggctgtgtctgagatgctgtgaatcttgaggctgagccttgctgagggcactgaagctccggggagtttatagctggaggctcgggcccgccccgaggggagagggagggggagagaattcctttgctcaaacacaagcctgggagttcagagacagccctgctgcccctggctccacactcagagtccagaagcctccgtgggcccctccccaaccccatgccaaccccatctgcatggcccaggagccccgcccctgctcccaccccacaccccaggctcccgtggtgctccaactacctcccttatagctccctgtgctttgacgtccccatgcccggcacacagtaggtccttggaggacctactaatgacacatgggctataaggaatgtttcctgttttcttctctctgttccctctttctatctaggtctctttctggacccccatttctgttgtctctgtggctctccatctgtgtgtctctgtgtgtctgtctctacttcttagtctcctcctctgtctctgtccatctttttgtctcctcctcccacccccacccctttgtctgccgccaggattccatcctggtgacaacaggcactaaagccgggaagcaggtgtggggagggggagggggagggtggggtgtcaattagggtgaaacctaccctccctccccacctccatctaacgctgatcttttttggtatccccctcccgcttcccagccaagccatgaccttgagttctaggttcaagccagccctggagagcaggcttcctcaccctccccgcctctccgtacctctgtctctggtggtctcggtctttgtgtttctgtgcatttctcggggccccttgctgggtctgtcttgggctctctctgcatctgtcgctttctgagcccctcagtgtgtttctcggcatgtgtctccgggtggttttgtctctgcatttctgtgggtgtctctgcatgtctgcccctctcagcgtttgtgtctgtgggggctcacagtctctctgtgcatttctgtccacctatgaccccatttctgtctctttttggctctgggtctctgtgtctgtgttcacgtctctatctttctagttctctccatgtctctcttagtgcccgcagttccccctctgtggctctccatttccatctcttatagggtctccatgtctctgcaccttgctgtgagtatatctctgtctctcttttctcctttctttgcacttccttctatgcatcttgtggtattttctccctctctctttgggtctttgcctggctcctactctctctactcccaactcagtctctctgttgtcggtcatgtctctctgcctgtctgtttctctgtgtctctctctctttgacctttagtcttggcatctctgtgcactccacatgggccagaggagctgtgacaatagagatcagaagactgatggaatgaactgtttgtggcaataagataccaaattataaacaagacctaaggccatgccaggcaagggttaagccacgcatccctacacttatataatcgactatgttccaactgccacaaggcttttcctttttctagcagctaaacaagcaccggcctcaagataagcaatattacaaccattgcagccatccattgccagatgctgactagctgaaccccctgttccacaaggcataactacagcattagttgaacaagagactgatttcagtaactttctcctgataagatgccgcagaccacggactggttctggctgttgacagaggctgtgcactgagtgtcttcatatccctgcttcgtgtttcgatacgaatgcattcaatggaatgcacttaaatgttaagcct[140 bp omitted]ggtgaaaccccgtctctacgaaaaacacaaaaattagctgggcgtggtggtgcatgcctgtaatcccagctactggagaggctgaggcaggagaatggcttgaacccaggacgcagaggttgcagtgagctgagatcgtgccactgcactccagcctgggtgacagagcaagactccgtctcaaaaaaaaaaaaaaatgagtgtttgcttgtcacacatgcgtgtgtccatgtgtccacctgtccatgaatattcatagctccttctataaccagttgaatacgtgcacttagctaacccactcagcataaattcctgccttgcccttccctcccttaaagtgcctgcttttgttttttggcaagaagccatgcttctggtcttcaggttgtgatccgcttcttaagaaacaaagctccgctctccaaattcatgaaccccgggattcttttcaataacacagccaagagtgcttcacatgggagacccatctggtccccaacctgctgtgtggctttgggggagccccacctgcagtcttcccatctgtctcctgcctaagccctgggtaatagacatggagtcactttcagctcagagagaagctttattcctcagggccctcctcagggcaggggcagtaggcaggaaggctcagctctcaaactttttcttgcggccctccattccactcagtgcatcgatgttcttgcgccagtctcccacctcccggttttcctggaggatggcgatgagtcagaggttagggtctcttcttggtctccagtctctcaagaatccctgtcttccctccagcctgtggggccactctaccctggatgcctaagtatctagttctggagcacttcctgtcttttcaagataatccctgccaattttccccatgcacttcctgtctccctcatgcacttcctgtccccctcatgcacttcctgtctttccccagcacttcctgtctccctcatgtactttctgtctttccccatccacttcctgtctccctcatgcacttcctgtctttcccctccacttcctgtctccttcctgcacttcctatctttcccctccacttcctgtctgccttatgcccttcctgtctccttccttctcttcttattatagtagtccctccttttctgcaattttactttgtgtggtttcagttacctgaggtaaaccatggcccaaaaatattaaatggaaaattccagaaataaacaattcataagtttgatggattctcaggtcaatagtagcctaacgccaggtcataatgcctatgtcatccacctcacctcatctcagcacataggcactgtcattttacatcacaaggaaaagaagggtgattacagtgctataagatattttgagaaagagaccacattcatgagttttattacaatctgttataattgttctattttattattattattatttgagacagggtctggctgcctcatccaagctggagtgcagtcgtgcaatctcggctcactgcagcctcaacttcctgggctcaagccatcctctcacctcagactcctgaggagctgggaccacaggtgtgtgccaccatgcccagctaacttttgttctgttttgttttgttttgagatggagtctcccagtgttgcctgggctggagtgcagtggtgagatctcggctcactgcaacctctgcctcccgggttcaagcaattctcctgcctcagcttcacaagtagctgggattacaggcacccacgaccacgcccagcaaatgtttgtatttttactacaggtggggtttcactgtgttggccaggctggtctcaaactcctgacctcatgatccgcccgccttggcctcccaaagcgctgggattacaggcacgagccaccacacccggtaactttggtattttttatagagacatggtctcgccatgttgcccaggctggtctcgaactccagagctcaagcaatctgcctgccttagcatcccaaagtgttgagattacaggcatgagccaccacgcccaaccttcttttgttgttatttattgttaatctcttactgtgtctaatttagaaatgaaactttatcataggtatgtatgtgtgtataggaaaaaaaattacatatagggttcagtacaatccatggtttcaggcatccactcctatctttcctgtcttcttctttaagatagggtctcactgtattgcccaggctggagtgcagtggtgcagtcatagctcactgcaccctcgatctcatgggctcaagcgattttcctgcctcagcctcctgagaagctgcatgccaccaccgtgactggctaatttaaaaaagaaatttgtagaaattaaaacaacaacatggtggtgtgcacctgtagtcccagctactcgggaggctgaggcatgagaatcacttgatcctgggaggcagaggttgcagtgagccgagatggtgtcactgcactccagcaaccgagatggtgtcattgcactccagcctgggcagcagagactccatcgcaaaaaaaaaaaaaaaaggaaattaaaaaaaaattttttttaaacctcaaagattacaggcataagccactgcacctggaccttcatgtacctctttgctcttacatggacttcctgtagccctaatgcacttcctgtcttccccttctacttcctgtcttcctcttgcatttctgaggaccccttactagctgcttctacctccaactccaagcaccatctgccctcaggcctagggttgttggcacccacagcccttcccctcagcatcctctttcctggccttagcccacactcaccttctcggtgtcctccttcttcacctgcttgaggtgggcccgcaggtccagggactccttagcccgggcccccagcagcgcctgcatcatggcatctgcagagatcctcactctccgcagggtgggccgcttaaacttgcctcgaaggtcaaagatcttctgagtcagatctgcaatctgggggcacacgagggggtgggtacttctccttccatttcccgcacacccaactcctccatcctacactccttttttattctccttatctcgtcttccagtaccgaggccttaccagtctcttcccggcttaggctcccagtctaggcttctaatcctggaactgaatccccctcctcatatgctccagcctcacctctcaaaaccactggcataacctggtccagctacatgcaaatcacaattccctggccagtgcctgagctaatttaccaacatgtgatgccctgagcatgttcactaacttattttctgtttcccaacccatggccttgcatgtgctgttccctctgcctagaacagctttccttgactatattgtactcatccttctgccccagccctgccaggctcacagttgtcctgggtctcctgggatgtgcagccaaaagcagctgcaaggggtcaggcagagaccaagtcccagccatctcaccctaccccgaaggtacccgagctgcccatgcgtcccacctccgtgatgttcttggtgacttttgcctctatgtcgtatctctcttcatccaccttgtccacacgggcgtggagctgtcggcacaagtcctggaggaggaacgtggtgtgtgttgttgggggaaccaaaaacagggagacctggactcctgggtctgagggagaaggggctcggggcctggactcctgggtctgagggaggagaaggggctgggggcctggactcctgggtctgagggaggagttgggggcctggactcctgggtttgagggaggagaaggggctgggggcctggactcctgggtctgagggaggaggggctgagggcctcgattccagggtctgagggaggaggggctggggactggactcctgggtctgagggaggaggggctggggactggactcctgggtctgagggaggaggggctggggcctggacttcagggtctgagggaggaggggctggggactggactcctgggtctgagggaggaggggctggggcctggactccagggtctgagggaggaggggctggggcctggactccagggtctgagggaggaggagctggggcctggactccagggtctgagggaggaggggctggggcctggactccagggtctgagggaggagaggctggggcctggactccagggtctcagggaggagaggctggggcctggactccagggtctgagggaggaggggctggggcctggactccagggtctgagggaggaggggctggggactggactcctgggtctgagggaggaggggctggggcctggacttcagggtctgagggaggaggggctggggcctggacttcagggtctgagggaggaggggctggggcctggacttcagggtctgagggaggaggggctgagggcctcgattccagggtctgagggaggaggggctggggactggactcctgggtctgagggaggaggggctggggcctggactccagggtctgagggaggaggggctgggggcctggactccagggtctgagggaggaggggctggggcctggactccagggtctgagggaggaggggctggggcctggactccagggtctgagggaggaggggctggggcctggacttcagggtctcagggaggaggggctggggactggactcctgggtctgagggaggaggggctggggcctggactccagggtctgagggaggaggggctggggcttgggcttctgtctgggataggagggccacatggtcctgaaggagtaggttggagccaagactccacagacctgcacacaaagggtgttaggggccaggagtcccacgaaccatatataattgggtaaggacagccatattggacgcctgggtcccgagcagaagaggggatagaggctgtactgctgaattccgggactagaaacctcgcatccttgggagccggtacctgcagctccgcgaagcccagcccggccaactccagcggctggcagcgggtgctcagagcgcgccccttctctccgcgccgctcctccgcctctcgctccagctcttgctttgcaatctgcagcagcagagtctgcagaggggtgggagggaagcgcagcccacccggggcttcaggataaagaccaggcgtggggaaccgcctctgcccttctaaaccctccagtttggtctccactgttccaaggccccgtcccaccccgagcagtactccccgctaaagccacgccccgagcggccaaaccccgcccacttccgcccacctaccccgaaagccccacccattctcaagctccgccccctgagcacctgcctgctctttcccagtcccgcccgtcctcaccttcagctgcaattttctcgaggcggagatcttagattttttctgccagggtgagatggagcaaggaaggatcatggagggggattcggagacgacggtggaggggacctcaagacacccccagcaaacccagccggtccagatttgggcccacgtccaacttgagccctgagtctacgggaggccacgcccctcattcccatccaccaatctgggtctcttcctttggataggcacttcccatctatccctaagcaagtccgagggcaacggagttccgcccgcaggctgctgtcaccaatccgagcatgaccctctgcaaaactccgcccctgaagcccctccgcgtagtccccgcccccttcgcagccctggctcctccccccactcccagggtcttggatccctccggcgcctgtactctgcccccaggaagccccgtcccaccttggcgtgcggctccgtggcataagcgcggtagttggaggagcggcgtctgattggggctggtgcagggcgaggttccctagcctgggttaggaggagtggggaccccatcaccaccaagaccccacccagcccttaccgtaccgcaccctctgctagggctgcagcctcccgccccagacccctcactgcagcgcccaccctggccctgggggtcccagccacgccttagcccgctgctctcaccgcatcgctgctcctggaaggagagaaaccaaggaggggggttagtggtgggctgtgtcctgtctcctaagggacccctggagtcccctctgaacaagaggtcgggggaccgcgcttccccttccttgggttccaggagtctgactcgcaaacccacttcctctcttcacccaagagtccctacgcctacctcgcaggccaagggtccagcctctcagctgcgacccctcttgggaacccgggaggtcgcccccaactcccactgccttggggcatcactcacccatccgccatgctgagactcaggccgggaatggcaggaggcagggcgaggacaggggcgtttggagggtcagtgagggggccgcccgggtgaccttcagggtcccagggaccgtcagtctcctccgggctgcttgagactccccgaggacactgagataaagggcgaggacacagactaaatatactgtcacctcctcctccccctgcccactatgccagataacgggggcgcgtgaggggcggggtgggccctgctccagctggatcaccagccacctccgggcacaggaatccggaccctcctccctctgatcctggagtcctagacccctcctccctcagacccagagaatgcccgacctcccaacctcctcctccctcagtcccaggaccctgggagaccctggccactccctcacacaaggagtccaggcccccagcccccttttccctcagactcaagtgtctgggcccccagctcctcttccctcagacccaagagtccaggcccccagcccctcctccctcagacccaagagtccaggcccccagctcctcttccctcagacccaagagtccaggccccagcccctcctccctcagacccaagagtccaggccccagcccctcctccctcagacccaggagtccaggcccccagcccctcctccctcagacccaggggtccaggcccccagcccctccctcagacaagggagtccaggcaggcccccagcacacttcctctctcagactcaagagtctgcaccctcagctcctcctccctcagaccaggagtccaggaccccaatccctctcccctcagaccgaggagtccaggaccccaatccctctcccctcagacccaggagtccaggccactcaataaatgttgttgattaatttgaggatgcagctgtgctcggggctagctctcagtcaatagcactgggaaatccatccctcgtccacttggaaacccaggaatctggtttctggcttcctctgtccagcactcctgggcctttctctcccagccctggagacggacataggacaggaaagacgcttggacacacagaagggtggacacaacttgctttacttgaaccatctgggtgctgaccaggccctggtgaggagacaccccagcccctagtcagccacagggtgcctgggaacaagggggccaaagtcaagggcctgagactcagtgtcagatcctaggctgggcttagagcctcagaagtggaatttggaattctgagagaacaatctagaattctaggaatagaccatagaatctcagaaatggaatttgaaagtctaccaacactcccggggtgggggtggcgggtactgagtgggaatgattagaataaaattgaggactctagcagcggacttagaatggtatcagcgggttctcatcctacaacctgactttggaagttggagataaggggtgtctaggggttgggtcagactccagttttggagtctgactcacagttgggcggagccaaggccccctgaggctgagccagaacctctgagagtgaacctggagactcagagggcagctggcagggctcacagtgtggggtcccaccctgcagaggctgggtcaggccctcaagggctgggttgctggcttcaagaggctgggccaggatgtcaaggggcggagttccgggttccacagctgggacagtgttgcccagagctgattcctgggacttgcagaaacgtgcgaaggtctctgaaggcctggccccggtctgtggagcaaatccagctgcctgagctagctccctgacccgggtgttgaatccctgcagctgctcctgccgcacgtccaccaggtacctgcagatgggaagcgccctgtcagggacccagattttgatccccagccaggatgttccccaccctccaccccactgactcaccgggctaattccacaatcaagttccctccgggtgccacacaggccccaagctcagggatgagaagatggaccatactgcagagaggacggaggacaggctgagattcagctccaaatccggagggaggatggggctctgggatcccagacaatgagggaggaggggtggcaaaactggagtctgggtcctggggaaagaagggagcaggaggtctggactcctgggtctgagggaggaggggctgggggcctggacccctgggtctaagcaaggaggggctgggggcctggactcctgggtctgagggaggaggggctgggggcctgatcctgggtctttgtgagcacagctgcctccccgcttacccacaggccacatagaggagctggaatcggccgttgtagcagctcttgtggtggagagtctgagcagaattgagcggcaggaagtggacggtgaaagattccggggtcggggctgctgggggaaggggatagaggggtcacctctgacaggcggagccataagggcggaaaaccagagagatacacagagctgggcagagctgggcaggcacacaggacttggagataacactttttgtcctcttgcagctttttaaaaaatcctctaaggtaggctcctggaaagttctgggaaggtcagcctggcaggcagagactcactgtacagatcaggcaactgagactctagagagggaaagagggtgggtggccagggccacatgtgacatgccctgtcagacagacacgcagggagggccaggttggaggatggctggaaggaggcccagccaggatccagggtgtgggaggctgtccaagggggagctgggacccagcaccctgtgagaatattcttggatagcttagccctctgcagataagattagaattctgctagtggaattcagaattctaagcatgctctcagaatttaggaaagggagagaaagagagaaaaagagacagaatatcaagaagccgtcacttgcccaggcattccaaatcatgtcagtccacactccagtgtgaaacacctggaggctggagtccctggcttacctgttgttgtccctggcttacctggagtccctggctccgggcttccctccgcgtgctgctgctcctccaggtcccccccggtggctctcgcgcgcccccaggcggccacgtcgcggagcagctccgtcacgttgtgttgagtgatctccccggccgtctaacagtagaaggggcgtggccagacgtcggggccaggatggcggggcggggcttagaacgctgggagtcctcggtccaggactagaactcccgcagctgcttggaggatgtgaagtggggcgggacctatcccgcggggatggggcctgttctctgaatggagtcgttcccaccaagcgacgggcggggtctggagctgggggcggggcctgctgtgggggcggggccttgcgcacccaccgacccccagccccacctctacccccagtcccagcctcgccgcgcaccttgactggctggccgttgctcgtccgcaggaggctctcgtcgtccgcttcgatgccgaaggccacgaagggccccgtggcgatgtccccccagtacccgcgcgctgccacgcgctccccacgctggaaaaggagggagagaggaggcaggtgaggtcgatgttggggcccctgactcctaggactccgagcagcagcagtgggccaggacaggcagtggacacgcacgtagctcaggaggcgaccggacgccagggtccggttgggcacatgataggcgctggagtccctgagttcaaaggcgacgcctgtgtcccgccagcgtcggaactcctgggggtgaatgacttgagcctggggtggggggcgggaagaagggagccctcagtgaaccgagcgtggagagacccctacaccagcctccctcagacccaggagtccaggtccccaggccctcctccctcagacccaggagttcaggcccccaaaccctcctccctcagactcaggaggcccccagcccctcctccctcagacccaggggtccaggcccccagcccctctcctgggcccctcaccccgcggtcatgcagcttcatgcgcaggtcccagtcgctgacaccgcgccgggcgtcgtagcgggagcccaggtagtggcgcaggcgcgagtcccagaggcggctcatggggaacgcctggggccctttctcgccgccagcccagaagcggaatacggcctccagggcatcccgctcgcggaactgcggggccaggcacgcggtgggacagaggaaggcagagagggatgcagggagagcggattctaattgaccctctcttccatcccagaacaggggaacgattcccccgtttctcggatggaaaaactgaggctccgaaagcagaagccacctcctgcccccaggccaaatcccacagtgggagtcggggaactgggattcgaaccccctagcccgccgcctgctccatcaacgcacgtcctttggactgtgcgcttccattattcccgcggccacccgatcccagatggaggccgggcggcggcaccttgagggcgcggaggctgagccagggcagctgttcctccaggcggtcgggctcggggaccaggtgcgccagcaggtcggcctgggcacgcacgaaggcggccactggcgggcgcagcagcgcgttcccccacacttccaggaaggtctcgcttcgctctacggagagagggagataattgcgggaatgtgtggaggagggagcccagaaattacacccttaatatgttattatgtcatagtcatctaatgaaaacaatgaacccccgcaaactccccacgcatcccaaaaactacatgaagaacagggccggacatggtggcgggcgcctgtaatcccagttactcgggaggctgaggcaggagaatcgcttgaacccggaggcggaggttgcaatgggccgagatcatgccattgcactccagcctgggcaacagagtgagactccgcctctaaaataaataaataaataaccacctagaagagggaattagagttgcagattccacactcaccgcagacagagaatatttgggggaaaagataacaacacaacagtaaaaaataatacaaattgtaaaatatggtgtaagcatttacattgtattacatattataggtaatctagagatgatttgcggtgtatgggaccatgtgtacaggctatttgtaagtacatcttttttgttttgagacagtgtctcactctgttgcccaggctgaatgcagttgtgccatcatagttcactgttacctcgaccacctgagcttaagggaccctcctcctccagcttcccagctagctggggctaggcattagctaccacacccagctaatgttttatttctttttcttttctttttcttttttttttttttttttttttttttttttgagacggagtctcgctctgtcgcctagactgtagtgcagtggcgcgatcccggctcactgcaagctccgcctcccgggttcacgccattcttctgcctc[373 bp omitted]caggccagtctcaaactcgtggtctcaagcagtcctcccacctcaggctcccaaagtgttaggattacaggcgtgagccaccgcccctggcaatactatacaattttataagggacttgagcatccttggatcttggtatctgcaggggtcctggaaccagtccccagtgttactgagggatgactgtatatacctttgcatataatatatatacacatagacatacaaatagtttcatgttagttgtttaagaacttaatagaagagaactatgtgcctttagtaaaatagatcagtttagttctaactgtttaagaactttgaacaatctgtactgtgcaatgtactctgaattccctgggtcattaatgactgatatggtttggatctgtgtccctgcttaaatctcatgttgaattgtaatccccaatattggaggcggggcctggtgggaggtgattgggtcacaggggcagatttctcccttgctgttctcgtgatagtgagttcccacaaaatctggttatttgcaagtgtgcgcctcttccccactgcctctcttgccccttttcctgccgtggaacagatgcctgcatccccttcgcctcctgtcatgattgtaagtttcctgaggccttcccagccatactccctgtacagcctgtggaactgtgagtcaattaaacctcttttcttggggccgggtgtgatcgcacccgcctgtaaacctagcactttggcaggccaaggcgggcggatcacctgaggtcagcatctcgagaccatcctggccaacatggtgaaaccccggctctactaaaaatacaaaaccttagccgggcatggtggtgcatgcctgtaatcccagctacttgggagactgaggcaggagaattgcttgaatccaggaggcagaggttatggagagccaagatcgtgccattgcactccaatctgggcaacgggacaagactctgcctcaaataaataaataaataaacaaacaaacctgttttctttttctttctttcttttttttttagatggaggttttgcttttgtcgcccaggctggagtgcagtggtgtgatctcggctcactgcaacctctgcctcccgggttcaagtgattctcctgcttcagcctcccgagtagctgggactacaggcgcctgccaccaca[132 bp omitted]acccagcctctcctggaattttctaagtggctctaagatgtattatatttagccccattttacaggtaggaggagctgaggctctaagatggcaaattacatcagaggggaccatcatcaataaatatattggattttttttttcatcagaggtaccacactggaaaataccaaacatttttggtttttagatggagtttcgctctcttttttttttttttttttttttttttgagacggagtctcgctctgtcaccctggctggagtgcagtggcgcgatctcagctcactgcaagctccgcctgccgggttcacgccattctcctgcctcggcctcccaaagtgctgggattaacaggcgtgagccaccgcgcccggccggagtttcgctcttgttgcctaggctggagtgcaatggcgcgatctcggctcactgtaacctccgcctcccaggaaaataaccaaactttttaattgtaccattgaaatgccagaatccctctagggagggggaggagaccagcggtcagaatgcctgggtcctagcaacagaccttgcagccccatcttctccggttcctccagggctaggctgaagatcagcatgtgtcgggccacagcttccagattattctccagcacaaagaactagaaggatggacagggcagaataattctgagacctgtttgcctgggtcctaggagacccaggagagcaggccctcagctctctccttccacacacccgagttctgtacaccagcctcttccttcaaacacagaagtctgtgtccccagagctctcttcccttccattactcagaagacctcatcctcgagctcttccccactatagaacccaggagttccaaaccccagccccttccttcccccaagacgcatcggttcgctcccagcttctgcctccctcagatctaggagtctccagccccttcattcctggacctgaggttttagaatttcaatcccttcctccctcaaggactcgggaatctgggctctcatcttcatcccagctcacgttgaacctcctgcgaggccagaacttcgctcgggacagggtccgcagcaggtgccgtccatccacagagcccagaagcagcacatctagctcggggttgctgtgcactgtatcggcctgggagtctgggtccacaggaggacctggcaagatgacagctggctggggcaccatggtggttggcagagcgtccaccgtagcatcccctataaaaaatggactacaaatcccagtaggcgttccgcccgtggcctaggttctaaggggaggtgtttcctctgagtattctgggattcgcagtccgcagacaggacctcggggctgcccctgggagcgcgccctctgccgctggagcgttggagaacgttagcgccccccttgccaccgacgctgggactacgagctctaaaaggccgtctgctcaggctgggaaggcagacggtgtatcagaccttgcgtgctgggactcactttcagcctgcaggtccagcgccggggacaggccccaccaggacacggagccgaagccgctgccggagccggcaggtgtggtcatcaccctgcggaaaagacattctgggaatcgcacacattgcccgccccgctcccctctcaccgcccctcacttctcgcccctttgcctccacatgataccttgcccacacctttatcctccaaatatcccgggacgccccttcctctctgctcagtgcagcactgtggacccgcggcactccacaaccgctgcccagagtccccgcccttttcgaggaatcaagcaatggaagcatgtgggatgggaccacagcgagcaactgaccaatgagagtgagcgaggcccgccctctacaaacttttggccaatgggagcactgagggccagccttcccccacacctaggagaagagggcgtgtggacgcggttgtcatgacgacggcgccggcgggggaaggggcggtgctagaacaggttggggcggagtcagggtcggtccaaatttctggaatgggggaggcctgggctgattaaaattgagagtgaagggagcttaatcttatttcttgttttttgtttttttgttttcttcatatgcctttgctcatacgtaacggaattttcatcaattcaaataaagtgaagtgtctagactttagatggcaggcttctgagcccgctccccgccccagcacaacgtgggctctaccacacagaacagcccacaggtgggacactgatgtgcaggtcattaaaaattcagggatttgtgagctggttattgttacacgaagccataatttaaacttacagctagatccttttgtagtttctaagcgggatgattgggtgttcacgcgcatgcgtgagatgtgcctccctcaaaccttgttacgacatcggcacattactcttctgacatgaacaaaaaaattacaggtaaattctgtaatcgtacagttaaatcaactgcattaaaataagggtaagtcggccgggcgctgtggccacgcctgtgatcccaacactttgggaggtcaaggtgggcagataacttgaggtcagaagttggagaccagtctggccaacatggtgaaaccgcgcctcgaccttaaaaaatacaaaaattaaccgggcgtggtggcacgcacctgtaatcccagctactccggaggctgaggcaggagagtctgttgaacctgggaggcagaggttgcagtgaactgagatcgcgcctctgaactccagcctgggcgacagagcaagactctgtctcaaaaaaaaaaaaaagaaaaaccaaagtctgaatgaggcacatctctagatcaccccagcacccagcactgggctcagcgcccaaggggacttggctctctgcctcctctccttgcccagacacatgagcttagaccagtcaccctttctgagcctcagtctgctgctctgtgaaatgggaatgtagcgtgcagcgggcagaggtgcagcggatctgcctcctgagggcagatctgggcactgggaagacaatacctactggggaaacgaaggttgagacctcagacattcctgcagaatcaggctggctaaccagccccttccaggccagctctaagcctgcaagagccccagatcctgggtttctctctggagaattaatgcctttcctccctatttctcccactctcccaacaaattctcagcaaaggaaccagagtgacattttttttttttgagatggagtcttgctgtgacacccaggctggagtgcagtggcgcgatctcggctcactgaaacctccgcctcccgggttcaagcgattctcctgtcccagcctcccaggtagctgggactacaggcatttgccaccacaccagctaatttttgtatttgtattttattttgtgtatatatatatatatacacacacaaaataaaatacaaatatatgtatatatatttatatatacacaaaataaaatacaaatattttgtatatatatacaaaataaaatacaaatatacatatatatacatatatatatatatatatatagagagagagagagagagagagagagagagagagtttcactcttgttgcccaggctggagtgcaatggcgcgatctcggctcaccgcaacctccgcctcccgggttcaagccattcttctgcctcagcctcccgagtagctgggattacaggcaggcgccaggacgcccggctaattttgtattttttgtagagacagggtttctccgtgttggtcaggctggtctccaactcacgacctcaggtgatctgcccgccttggtctctcaaagtgttgggattacaggtgtgaaccaccgagccaggcgatttatttatttattattttttttttagagacggagtcttgctctgtcgcccaggctggagtgcagtggcacgatcttggctcactgcaacctccgcttcccgggttctagcaattctcctgcctcagcctcccaagtagctgggattacaggcgcacgctgccacgcccagctaattttttgtattttagtagagacgaggtttcaccgtgttgcccaggctggtctcgaattcctgagctcaggcaatccacctgccttggcctcccaaagcgctaggattacaggcgtgagccaccgtgcccagctccagcgattcttttttatttttagtagagacggggtttcaccatgttagccaggctggtctcgaactcctgacttcaagagttccgccggcctcagcctcccaaagtgctggaattaccggtgtgagccactgcacctggcccagagtgatcttaaacataaatcaaataatgtctcccacctcttcaaatcctccaaagtcttcccgctgcacctggacacattccccgctccttagcttggctccctatgccctatgcaatctgcagtcatccacccctgaagccacatcagcctcctggctccttggagaacacaccaagccgtttgaaccccagggcctttgcaacttgggattcttttgccttaaattatcttccccctcatctttgttttctatatatttatttttgagacaaagtcttgctctgttatccagacttgagttcagtggtgtgatcatagctcactgcagcctcaacctctcaggctcaagcagtcctcccacctcagtcccctgagtagctgggaccacaggcaagtgccgccatgcccggatatttatttatttatttatgtagagaaagggtctcactagttgcccaggctgttatttatttacttatttgagatggagtttcactcttgttgcccaggttggagtgcaatggcgctatctcggctcactgcaacgtccacctgccgggttcaagccattctcctgcctcagcctcctgagtagctgggactacaggcatgtgccatcacgcccagctaattttgtatttttagtagagacagggtttctccgtgttggtcaggctggtctcaaactcccgacctcaagtgatccgccggccttggcctcccaaaattctgagattacaggcgtgagccactgcgcccggctgtatttatttatttatttatttaaggcagggacttgctctgttgcctaggctggagtactccagcctgaaactcctgggctcaatcgatcctcccacctctgctccccaagtagctagaactatagccacgtgccagcatacctagctaactttacaaattttaaaaatagagaggttatccaggctggtgtctaaccctgggccccaagcaatcctcctgcctcccaaagtgctaggattaaggcatgagccatcgtgcttggccttgttttctttttaaattggtgtaaaacacacacactattaagttgattgggaatgacatttagtacacttgcaatgctgtgcaaccatcaccactgtctaattccagaactttctcatcactccaaaagaaaacacgtaccccatttatctccccatttctctctcctctgtccctggcaaccacgaatctactttctgtctctatgtatttgtcagtgcaggagatttcttttggatggaatactgcactatgcagccttctgtatccggcttccttcacttggcataatattttcaggactcatctatgctgaagcatgaatcaatgctttcttctgtttttatgaccaaataatattccactgttgttctccctaacctttgcaagcttcgttccttcttgtcattcaagtcatggcccagaccgcacctcctcagcaaggctgcccctgaccaccctccctaagttatgtcagcctttttacgttttggtcccagtgtggacggccatttgtaatggttttattcttctatcgctctgctttcttgttgagacagagacccaaggaccccattgccatcatctaaatcaatcccaggatttagagacaggctctctggctgtgtgattctgagcatttcacaggaattctctctctctctctctctctctttttttagatggagttttgctcttgttgtccaggctggagtgcaatggcgcgatctcgactcactgcaacctccacctcctgggttcaagcgagtctcctgcctcagcctccctagtagctgggattacaggtgcttgccacgacacccagttaatttttgtatttttagtagagacagggtttcagcatg[136 bp omitted]tgggaataatgatcatgtttatttcatgagtttgctgtgaggattattattggcagtaatagtagtaacataaagggctgtcttcataaagacatgctctacagccacacacacacacacacacacacacacacacacacacacactcacacacatgaaaagttactgaattcctttggagaaaaattaaaaatctcatggatattataatctgtgtagctgttctattttcactttcccgattggctaccaggaagcttaggagcaagtaagtttgtttgctgcctccttttttggtacgtgggggtaatttttgcctcattctccacttaatctgctgctcagagagttctctggccaaatcttataggtctttgttcaccacccaaaattctgtatgggatgagataaggtagaagccaatggaactatcatctttgctagaaacagagtaggaggcagcattcgttgaaagaacaatgaggtcagatgcggcggctcatgtctacagtcccagctactcacacaggaggattgcaggagtttgaaaccagcctgtgcaacatagcaagaccccatctctaaaaaagaaaagaaaagaaaagaaaaaattagctaggcatggttgcatgtgcctgtggtcccagctactcaggagtctgaggcaggaggatcccctgagcccaggaggttgaggctgcagtgagctatgattgccccaccgcactccagccagggtacacagagaaaccctgtcaaaaaaagaagaaagaagaggctgaggcagaagaatcgcttgaacccgggaggcaggggttgcggtgagccgagattgcaccattgccctccattctgggcaacaacagcgaaactccgtctcaaaattaaaaaaaagaagaagagaagaaaagaaatagaaaagaaaagaaaagaagaagggccgggcgcggtggctcacgcctgtaatcctagcacattgggaggccgaggcgggcggatcacgaggtcaggagatcgagatcatcctggctaacacggtgaaatgccgtctctactaaaaatacaaaaaaattagccgggtgtggtggcgggcgcctgtagtcccagctgctcgggaggctgaggcaggagaatggcgtgaacccgggaggaggagcttgcagtgagccgaaatcgtgccactgcactccagcctgggcgacaaagtgagacttcatctcaaaaaaacaaaaacaaaaacaaaaaaacaaacaaacaaaaaaaaaacaagagaaaaagaaagaaaaggaaagacagaaagaaaacaaaaaggaaaaaagaaaagaaaaaagaaagaggtgaagttgaaatcattggctttccttgctgaactccaacctctctcgcaggctctggagattgtattccctggctccgcgcctctcctttgttttgatggcagtaagtcgcttggggggtcaggtctgtgtttggatattctggggccccagcactcaacagaagacctcagggaatatggaatggaaggaagaaaaaaaagagagggagggagggatgcagaaatgggtatgaaaatcgatgtgagtcatgggtgagcaagcgagtggataaattcatggacaagcaagggagttctcgcggactcctcacagccagcgtgtggcaggaattattattatcccaacattctccagaggaggaaacccaggctcagagtggtgagtgaggaatgaacgggtgagagtgtgagggagtccatggggtcaggccagtctctcagaggctttcaggacgaacagcactcacaccgccctgcgagcgcccattcctggaaacgaggtttcctcttgggtcccagcccttgcccacccccatcaaggagcatgggcccaggccaccggagctgctgaatatttatttggccccaggagcagtgcagggatgggctgtgttggaagagagaggagagcagacgaggatggctgattgtcaaagcagggggcaggacccgggggcaggagaaaccaggctgccttcccttcccggggtccctggggcatctgggtgtgtccgcgagggtcgggggagtgtgctggaaagttgtcgtgattggcatcgttgggggtgagaagacaggaatggttcagatggttggggtggaaggtggggggagggtaaccgtcagaggaagcttaagggtggggctggcttggctttggccggtctcgggagtctggggtcaggggctagagtccaggcttggccgggggcttggggtgggagtcagggcgcaggcagcagcctcactcggtccgggggccgcagcgagtgccactgggcaatgggccgccgcgggttggccagcatgtccgcccagtgccgcaggccagccccgccggcggccgcccccacggccaccctcccgatggcctcgttcttgcccagcttgtcgtagtccagcacggtcagctccacctgcaccttctggggtgggcgcgggaggaagaggagagaggagcgtgaggggaggaggccccggaaggggcggtgtccgttttcacggctgagggtacctctcgctgccacccgagggctcggggccccggagctcgggacgggggagggggtgggagacgagagggacggagcctgcggcgaggaggaggctctggcgcctttcttcctgcgcagccaggtttctaaggaaatgaaccctcaggactcggttgcggagcgggtgtgttcggcgcctcctgggggagcagcctcctaagagccgcaaagctgcagaactttaacaggggccgggctagggtaggcgccgtccctaaagaagtgaggggaggtctctttttcttagaaccacgttcctgaggagggcggggcatcctggtcctgcttagggtggggaatctggtcccgcttaggagtggggcatcctggtcccgcttgggggcggggcatcctggtcctgcttgggggcggggcatcctggtcctgcttgggggcggagcatcctggttccgcttggtggggcggggcatactgatcctgcttagggtggagcatctggtactgcttaggggtgggacatcccggtcccgcttagagcagataggacacccacacccaattttaaggagtctcttcctggagtggaagaggcttcctggtcctcataggaggaaacagactgagagcataacctcagaccccctcacctggtttctagggagatgctaaaaagtctccctccgcctagcaatggcgattactaaaggtctgggctcttggagaagggcaggtttgagctcacctggacttggtcacagggcacctcgaagctgaaagcttcgttgtaataggggttcagagtgttcttcttgatggtggttttcttcttccgcacctttttgccgccctgcagcaggtggaccttgacgtatggatctggggagaggaaggaggagtcttatagctccccactgctgggttgttggaccaacatagaaacactgcctacacccttcgggtctccctagctctatgccaaaatccatgccttccacagcagccaggtcctccctgtccccgaagaaaccctcgaggctcagaaactgtcagaacgagaacccaccccacgccatccccacacaccccactcccttgcttcccacacacctgacagtcctcctacgtccatcttcttcaggtttttagcctccaggacgatgacggtgagcttcccggccgtggggacatagcggagggagaagcagatgtccccaagcttctcctgctgaaaggagaggggcccatcaccagagccccggctccacatccatgcctcctcaggggtacaatccacgccgccctgagggtctggaaagcctatgatctgattggctcaggatgttgtgggcgggactgggcctgggggcgtggctcggggcgcgaccgcgcatgctcacctcctcccgcggagccgcctgcagctcccgccaggcctgcactggccgccccaggtccacggagctcatagggacccgcacctccccgatggcgtcattgcgagagaagcggtcgaagtcgtacaccgccatgaccagcaccctgccccccagctccacgtaggggacctggagtgcacagagaatccgcagtagagagcaggaagtcagagatagggtgaggcacagcacaaccagaaggaaggcatggagtgaggcagcgagggtcgaagcgaacagttgggggaactcaaatgggaaagtccagggatccatgcggaaaaaaatcacgggtcagtggaacccaaatcgtaccgcccaaggaccaggctacagcccaggagtcagtagtgcccagggtccagtggaatagccccagagctggtagctgccacctgagctgtggccgcctccaggaaaagcggaaggggtcggtccctagtgttccagggactgggcacaggctatggaacacggggcctgaaggcaggagctcaccttgaaggcgaaggtctccccaaagtgagggttcagcgtctgccgatgcaccttggtctcgtaccgcctccgtttgtccggcagcaggtagacccgcacataggggtccgaggagccaccaagatccaaggctgccaatcccattgcttgcagaatgcccaccagcagctgcagggcccaggcacagtgggggaggtggggaacactagtcttagcctcccttccatggctcctttcagaaggggttggaacccccgggatcctccctccaaagcttccccttcctccacacccacctggccactctggaagtcataatccagggagtactgcagtcgtcctagctcatgcttgtctgccacctgctgccctggcccggatggtgctggctccagctcctctacttctggctgcaccttaaggagccaggggtaagggtgggtgaagtcttcccctgatagcagtatccatcaggctcagaagccaagggaggctcacaggtcccttgggctatacctgagctctcacaggctaagcagattcagtatttgactagtgctgtctgccacaggcaggaaatagacgtggtaacacagatgcagtatgtttgtgaaggtttgattagtggtgtctgctatgggcaggaactagacatgtgcttgtcatgcttagattaaaacaagtgctgatagtgtcccattgcccacaggaataatgcaggttttatttcacatgctaatggatgtactggggtgctagtccaaactgccatgtttacttgtgatcttagcacagcaaaacatggaggagaaatggcatatttactgtgtacttgccattctaaagttgaatgaaaaagcagaaggtgtctccttaacctaggccagcaattcttaaaattcaatgtgaacctgaattcccctgaatcctgtggcaaaatgtctgaggtcacctcttcagggattctgacttgataggtcaggtgctagtgccagaatttgcatttcaacaagtacccagtgtgattctgctgcagacggtctttgaacatcactggtttaagggacagggatggggctggacaccaggaccctaaatagcatcctttacggatgctaattgaacagctccttattgagaaggaaggaggggaaataccaagttagtgaccacagacttgaggctcagagagggacagtgagttctccaaggtcacacaaccaggaaatggtccttcttggttggaaacctagggctgtctggctcccaggcaaccactgcactctgcactgagagacttaattttcagaccctgcagtgaccactttccattccaacggcctcatccaatgcaaatgtcttttatcctctccaggctgctgctgcactggcctcgtccctggatccctcgccgcagatctgtcctacacagggttccagaggagtcatcctaacaccatctgaccctgtccctctcatgctcaaaacatatttgtagccttcatcaccttcatgacatggatactgctgagttctccagacacttcactccagagtgcagctattgtgagaaatgactctttgttccccaaataagcctcagaatctggatatggggcctgaatctggatatggggcctcaacacatgctccaacttggactagaatgtccttctctctggtctcagttaactctgtccctcaggtctcagtgcagaagtcacctccaccacgaagcctcctctgtctgaccctctgttttaaactttttcctactgtaaatatgtcccattttctgaaaaaaatcagcatattttaaagtattctggcacaaagctggttttcagctttcagagccatttatttatttatctatttattggagacagagtctcgctctgtcacccaggctggagtgcagtggcgcgatcacagctcactgcagcctccacctcccggtttcagtgcctcagcctctcgagtagctgggattataccacaccaccatggctggcttttgtatttttagtagagacagggtttcatcatgttgcccaggctagtcttgaattcatgacctcaggcaatctgtccacctcagcctcccaagtgctaggattacaggcgtgagccaccgcacccggcccagagccaaatatttatatgtttctgtaggtttctatacagtgggatgccttttctgtgctcctatgagaccctgtagtatggcacatattaccctgtgtggtgagtgtctgtgtcagtgcctgactctcccaccagactgggaagttcttgggaatagcaactagttctgttccatctctgggtccccagagtccagttgagggctagacacacagggaggatgagccagtaaggtgggttcctataggacagaagggagcagggactgggaccagctgggccattgagaggagcagggtgcgggaaggggccaggtggaggggctgggctgggccacaccttgtctatgtaactctggcccagccccttcacttcctgaaggtggacctgggcttgggcctggctcttcttgcctgtccgcctccgacagctcttccggtagagacagaaacagcagctgaagatgaggaggcctgagaccagcacgatggtggccagggcccaggggggcactgcagaggggtggagacaacacacattgaggcctgggcagcacgcaggctgattcagtcctgattacacgtggaagctggaatgctggcctccttttccctccagccattttcattgcatttcttcctgtgtttttcttccacctaatgtggcctatagagagattcgatgccccaacccaggctgacaccatctggatttgcttgcttgttagttctgcctttccttacccgaccccgccccccatttctgctcaactcctgatgcttttacaagaagccctgctcctcatcgggcctgtttccttatctgtaaaagaagagctaggtggaccttccaattctaagatcccattccatgcaacaccccttgatccggtttcgatttttttttttttttttttttttttttttttgcaaatctgttccttccttttaccccatttcgttcgcattccagtccaggatgacgacccgggatcccagccggattttccagcccgcctgcccgagtacacccgtccgaatcccgcccctcggaatcctggccaggctttctctctgctcggccccccacccccgggtcttgctcacctgggccgtggctgatgcgactggagtcgggaggcgtgtcgggcgatggaggccccggggttgggggctccgggaacatggtggcggggtcctggagtcttttctgcagagacactcaagcaccctagtcccccattcccaccccagacgtcctttgagccccacgcacaacaaagaactccaactcccatgaggcctttgcgcgaacagccgcgcagaaaccggacagccaccgcgagtcatgctgggagttgtagtatcagcctccccgcacttgagagggggtgtccaggacctagttccatcctaaagggataccctcttcctccacggccccacaggcatcccgctgacttctgcctcgtcctcgcccctccgcagggtctgaaccggaagcgggcgaaggcagacgtgggaaccagcagaccgcgttgcccagagcaacagccgggctcctctcaagcggggtgagagcaaagctggttgcccgggcaacgggttgttgccaggacaacgggcggggctgacgcacagacgcggagtcccggcggggcaggctcgctccggggcccaccggtgcctgggaaccccccaatagcccgactgggatcctgaggtcccgcgaggtggggagcgggcagcctgtggtccgagcgcccacagccgactgctccctccgcacctggtcctgggagctgagacgcaggttccctcttccctctccccaattttgctggagggcgggtcgggggctgcccggtgcctgtgctgagccccctcatccttcttggcctgttggtctctccacgcatccgtgctgctctcgtgaccgcctcggtctccacgctgcctcttgaccccacataggcgtcttccctgtgtctgcctccccaacccgcctgtctctcttccctatcgcctggcctctgtctccagggtctctccctctcccctccgcctgcgccccactccccgccctcggctctttgtcttctccatacctgtctcgcgtccccagatccctgtctctccgcttcaggctgctgccctccctctggttgtctccccagtgccccagcccccactcgcacacccctttcctctagggatgcggatgcggatgggctgagggcgggggtcccagcagctcctacctgctcggcggctggacgggacactcccgggagacgccgaggcgccagccccgcccggaccccaccccctgcacgtgggcggtggcgctgtcccgggtgctgatcgcggagctctccggggcgggggagccgcggagcggagcaggatcccgtgcgcgcgtgtgtgcccgtgtgcgtgtgcgcgcgtgtgtggtgtgtattgtgtgtgcccgtatttggtctcgggtaggcggaaagccctgccccgcccctcctcccgcctccacccgggaacctcgatgacgcccacagatgtttatcctggtgctttagcattttctgccttctggtccagtcgttggccgtccagaccactccactcctcccgccccaacacacacgacacacaccctgtatagcccaaagaacggcatgccaggatactcagtcctaggacctaggagaccccagacccccattggagacccagactctgcagggttcagcatcaaagtccccagctatcagcccccagacatcgccctctaagttcccctaacaccagtcccaggaggcggccagtgcggtggctcatacctgtaacctcagcactttgggaggccgaagcaggaggaatgcttgagcccaggagctggagaccagcctgggcaacatagcaaaatcccgtctctacaaaaatgagccagcgtggtggtgcgcacttgtgatggcagctactctagaggctgaggtgggaagatcacctgggcccaggaggtcaaggctgcagtgagccactgcactccagtctgggcaacagagcaagaccatgtctcaaaaacaaaaacaaaaacagaacaaaacaacaacaacaacaacagagaagagtaaaagaaaagctcagaaggcaagtccccaagcacctagctccagcgagccctgtccatactgcccagaccctggacacagacgtctggacactgccttctctgagagactcaaccacccaaacctacattttttcatgtgcaaatgtgtgggtccctctagtcccctcctggacgttcgcctcgatccctagataccaggaacccatccctactcccaatccaatattatttccagacccagaaatccatgggacaactgtctctggggagaacagtgatttaataaattatgggatagaaggaaaaatacatgtggatggtggggtgcagagagaccttgggcacagggactccctccgaccccagattatagaagactgatttggtttctgaagtaaaatcaaggcaggatccttcctgcctttggtcctcaagtagccagaactccagacccaaattccttcctgcctcagaatccaggccccagcctgtttctttctgcatcctggaaagacctagggaatccaagctatcatccctctcctccttcagggaaccaggaatccagatccccagctcccataggactcatctgaagcccaccagaccactctctcctggggaaaccagagtttgggataccagccccctcctcccacagcacccaggagtctgggagcccagccctctgctcttccaggaatctgggctcaagtgggtgtccagagcttgaggatgcctgggctgccgacccagccccctcgtcacttagacctccaacttgtgggcctggatggcggccacgttctcgtagatgaggttttcgacatcctcatacgggacttccttctcggctggggcctgggctgactgttggaggaaccgcaggatgcactgatgcaggaatacgtactgagcctgggaagcaggcacgggagtgagaggcgtccccccaggtctgagctgcgtggagccccagggtccctcgtcccactgcctcccgtcctgtgttgctgagggactgcctcacctcagtctgcaccatcaacggccgactctctctcatcttccttacaaagctgaagggcccaaggagaccctcggactgcagctgccggagcaggacgtccagggcaatgagggttcctgtgcgacccacgccagcactaggcagaacaagggaagggtcagaccaaggggcaggagtgtgagggtccggggtcatggctgattggagggatctgtgtttgaatgatgacaataactatgcctgctcacacctgtaatcccagcactttgggaggctgaggccggtggatcacccaaggtcaggagttccagaccagcctggccaacctggcaaaaccgtctcttctaaaaatgcaaaaattagccgggtatggtggcgcatgcctgtaatcccagctacttgggaggctgaggcgaagaatcgcttgaacccaggaggtggaggttgcagtgagccaagatcacaccactgcactccagcctgggcgacaagagcaaaactcccatctcaaaaacaacaacaacaacaacaacaaaactgcctggagttccttccatctgttaggctctgttctaagtgcctgatgggccttcttcactcctcccaaacctaagaagtcggatgtactagctccattgtacaaatggggaaatggaggctgagtgaggtgaagtcccattccccaggccactcagctaataagtggcagagccggggttcaaatacaggaagaggaactctccagccaatcatttagtaattcctttaaacacaaaaattagtcttttgttttgtttgagacaggatctctctctgtcacgaaggctgaagtgcagtggcatgatctcggctcactgcacccttgacctcctgggctcaagtgatcctcctgtctcagcctcctgagtagcttggatcacaggcatgcaccactgcatctgactaacttattaactttttaatagagacggggtcttgccatgttgcccaggctggtctcaaactcctggactcaagtgatcctcccacctcagccccccaaagtgctgggattacagg[136 bp omitted]tggtgaaaccccgtctctactaaagtaccaaaaaaaaaaaaaaattacccgggtgtggtggcgggcgcctgtagtcccagctactcgagaggctgaggcaagggaatcacttgaacccgggaggcggagattgcagtgagccgagatcacatcactgcactcccagcctgggcgacagagcaagattccgtcc[135 bp omitted]catgaagaaacctcatctccactaaaaataccaaaattagccaggcggggtggcaggcacctgtattcccagctactcaagaggctgaggcaggagaattgcttgaacttgggaggtggaggttgcagtgagcggagatcgcaccgttgcactccagcctgggtgacatagcgagactctgtctccacaaaaaaaaatagctatttgaacgtgagcaatttgtcacactcacaacgctgtgcagcccccacctctatctacttgcaaaacactttcatcacccctaaagcagacaccacgcccattaggccgtctctccctattgcctgtcaccctccagggcctggaagctactaatctcttcagtgtctctgttgctttggctgatctagatatgcttctggatatgcacactaatggaatgatgtga[136 bp omitted]agaaaccccgtgtctactaaaaatacaaaattagccgggcgtggtggcacatgcctgtaatcccagctactcaggaggctgaggcaggagaattgcttgaacccaggaggcagaggttgcagtgagccgagatcatgccactgcactccagcctgggcaacaagagcgaaactctgcctccaaaataaacaaacaaataaataaataaaataaaataaaataaaatggggaggacacccttttgccatgagactgtcatgaggagcagtagaactgtgtaaatgttcactgtgactgaaaccagagccccagtctcaggggctgttactcttcctcatctccctaatagttaccgttaggtgaaatctgacctacgggacttcagcataaatatcaggaaagggtcaggtgcggtggctcacgcctgtcatctcagcactttgggaggcagaggcagacggatcacgaggtcaggagttcgagaccagcctggccaacatggtgaaaccccatctctactaaaaatacaaaaattagctgggtgtggtggtgagcagctgtaatcccagctactcgggaggctgagacaggagaattgcttgaactcgggaggcagaggttgcagtgagctgagattgcgccattgcactccaccctgggcgacagggagagactccatctcaaataaaataaaataaaataataaaataaaataaaataaataaaataaaataaatatcagggaagcagttgatgggggaggccctgcactccagcacagggaagtgtctccagtgtttctcagaatctgtggccacatccccatcctgtggcttcatcctttctcccttctcttctgcattcaaccttctctgcctttaccttttcatctttctttttttccttttttttttaatcgagacagagtcacccaggctggagtgcagtggtgcgacctcagctcactgcaacctctgcctcccgggttcaagtgattctcctgcctcagcctcctgagtagctgggattacaggtgcccgccacgacacccggctaatttttgtatgtttagtagagacaaggtttgtatgttggccaagctgttctcagactcctgaactcaagtgatccacccgccttggcctcccaaagtgctaggatttacaggcatgagccaccgctcctggcctgccttttcatctttcgttcccatcttttcatccttatcccctttcttttcttaatctgcttcacgcccccctttatcttccacatccacctcctccttctctccctcttcacctcccctgtacgttcccagggtcccgtctaacacaactgtctgagccccaagggagcggttctctcaagggagagggtcctgggctggtccccacctgcagtgcacaatgggtgggcctccctccatggtctgatccagccactgccgaagcatcctccagaaagccagcaaggtgtctggggaggagggaacgccgtgatccggccaggcctggtagtggaattggcgcacagacagtgtcttctgctcctccacctggaaggagggagcactcacaggctctggagatgaatgtagggaggacctggcttctagcaccaggagcgggttccctggggcacactgcagctcctcagaggagtgggtggaaggttggagttggtggagggtcctggatgcatggcatatgtcacaggggaaggctgagggccaggacggggctggacacacgcacctggaggagcagcagttcccgcaccgtccagttctccatcacttcctcacctaccagggttacccgcaggtgcccatgggtgcagggctgcgagtccagaggccagtaatgctcacacttcacctgggggaggaggaggggtcagagaacacaactcctcttacccaggtctgtggggtctgctttaggccccaaatgtgaaccagcagatgggctggggggagagtggggaacaggtctacactgaagacgcctggggttaccctggaggaatccgtaaggtctgggtgtggggtctacattggatgagtgttcggggcggggtcctgcacccagtcagcacccaggactcagatctctcacccggccggcctccatgcagttggtcagcatgaccagggtgtggctctgctgttcccacaccaggcgccagaagtcacccactgtctgtggcaggggaccctgggttgcaatgaactcctgggggctccagagaccctggttgaggaaggcaggcgggtcaggggggcctttagttgatccccgagctcttatctctccaggcgtgctgggcaccctttcaatcccaaccacgaccttacgggcatgaagctggcattgatgtagtcagagcctggctcctcatggatgggcttcaggggcacccgggaccagtcatctaggagaagaggccagcattagccaggcagagagacccagagaggcacagagacaagaccacaggcagagagacccagagaggcacagagacaagaccaagacccatggacaaaagtcatgccgagacgcaggcagaccttgggagctacacagggactgagaggggcggagggacctcagctgcagggagcaggccaggaggactctcaaagggacccacagccgggtgcagtgactcacacctgtaatcccagaactttgggaggctgaggtgggtggatcacctgaggtcaggaatttaagaccagcctggccaacatggtgaaacccggtcgccattaaaaatacaaaaattagccaggcatggtggcgggcgcctgtagtcccagctactagggaggctgaggcgggaggattgcttgaacccgagaggtggaggttgcagtgagcggaggtggtgccacttcactccagcctgggtgacagcaagactct[132 bp omitted]cctgtctctaccaaaaatacaaaaaattagccgggcgaggtggcgggcacctgtagtcccagctactcgggaggctgaggcaggagaatggcgtgaacccgggaggcggagcttgcagtgagccgagatcgcgccactgcactccagcctgggtgacagagcgagactccgtctcaaaaaaaaaaaaaaaagaaaaaaagaaaaaaaaaaaaggaagaaaaaaaaaaggagacccacggtagggggcaggacttgtttctcaaagcgggtaggagaaggggactggggtggggtgccgactagatcagggctgggacaaaagcagcaggaacccgagactcacagggcagcacatttctgtagcggttcttggcgttgttctctgaagccgaagccaccatctgagactggctgtggcccaccagggagagttgctggggatgcagggagagggggtacctggtgttggattttctctactttccctcgggggtacccccgagctccccttgccttcttcggcatcaccccttgtttattcgttgcaccctgagattatatggcacccacaaaaacagaatagatgtgtgtgccacctgccctgtggggcactggggaggatttagggaaccatgggacttcttcaggcaggcaagaaagcaggtgtcaggggagaaaggactcactgggtgggggcagagagagttactttaggactgacccaccattattttaagatttcagtgagtggaaagataacatggctgggaatctctgcacaatccaatgacatatgtgatgctacttttgcttaatcccgaaagccgtgaggtctggccagggggtggggggtgggggtctgggccaccggagggagactgagctcagcccctctgtcctctccccacctggtactcgtctgcaaaaccacagttgctgtccctctcattcttcctgacgtggtcagcgaagtcttcagctgggatgtcccctggggagctacgggttttgggggagcagg[154 bp omitted]tctactagaactacaaaaattagccgggcgtggtgttgcacgcctgtagtcccaactactcgggaggctgaggcagaagaatctcttgaacccgtgaggcagaggttgtggtgaaccgagatcgcaccactgcactccagcctgggtgaaagggcgagactccgtctcaaaaaataagaaataaaataaaataaaataaaaaataataaacatactcagacagccctacacttacacttctcatgcagaccagtttttttctccttcctgtcatcctatcaccatggcttggagtctatatccactactccagggaacacctttctccaaaatcgtcgtggcctccctgtctgtaattgcaaaggccacgtttcagcccccaccggcctgactgctcagcagcatttagcaccactgcctgtgcctgccttttctcctggatctgcactgttccggaacacccagccctggcttggcccccacctacccagctgctgcttgttcatttcctgggcaggcccctcctcctctgtccgtcttaaaaggtaactgttccccagtgtccaaccccaagccacttttcttgctggacgcacacttcttacagggtttggcccattcctgtagtttcactttctttctttttcttttccttttccgagaaagagtctcatcctgtcgcccaggttggagtgcagtggtgtgatctcagctcactgcaacctcagcctctggagctcaagtgattctcctgcctctgcctcctgcgtagctgggattacaggtgccagccaccatgcccggctaatttttgtatttttagtagaaacggggt[146 bp omitted]ttcttcctaaacatgttagactgtgtcactagcctattcaaaatctcccaagaactctcagctcacaataaatccaaagtcctaactttcaactacaggcctgtgcctgctgtggccccactgacgtctctctgacctcacttcccactgccctccccttcctcactctgctcagtcggagacgcacgatgttctctgaacctcacgtgtgctgttgcctcaggccctccacgcgcccatccctgtcctgggagcgcctttcccagatgcatgctcggctcctctcccacttgcgtaggcctgtactcagatgacttcctcttagtcatcttgttagcaaagctttccttgaatatcctgccgaaaatattcctgctgggtgcagcggctcacgcctgtgatgcaaacactttgggaggccgaggtggaagggctgcttggggccagaagttcaagaccagcctgggcaacctggtaagaccacccccccgacctccatctctacaaaaaattaaaaaattagccaggcattgtggtgcgtgcctgtggtcccagctactggggaggctgagatgggagggtcacttgagcccaggaggtcgaggctgcagtgagctatgattgcgccactgcactccagcctgggccacagagtgagaccctgtcttgacaaattaataaataaaataaaataaaataaaataattcatctgattttctctctaatttattctaattttcacattagaagaatatcaaaataggccaggggctgtggctcacgccggtaatcccagcactctgggaggccgaggcaggtggatcacaaggtcaggagttcaagaccagcctggccaacatagtgaaacactgtctctactaaaaaatacaaaaattagctgggcgtggtggtgcatgcctgtattcccagctactcgggaggctgaggcagtagaattgcttgaacccgggaggcggaggttgcggtgagccgagatcatgccactgcacttcagcctgggtgacagagcaagactccacctcaaaaaaaaaaaaaaagaatatcacaatattcctctacccttcctatcccctccttttgccttgtctccaagtttatttatatattttatatattataaatttatatattatatattatataatttatatattatattatatataatgtatattttatattgtataatatatataatatataatatattatatatataacatataatatattatatattataaatttatatattatatattatatatattataaattatatatatatataatttttttttgagacagagtctcactctgttgcccaggctggagtgcaatggtgcaatctcagctcactgcaacctctgctcccgggttcaagtgattctcctgccccagccacctgcgtagctgggattacaggcgtgagccaccatgcctggccctgtctgaaagtttatatcatattttttatgatcttttttaattttttattactattatttttttgagacggagtctcgatctgtcacccaggctgcagtgcagtggcgtgatctcaactcactgcaagctctacctcccaggttcacgccattctcctgcctcagcctcccaagtagctgggactataggtgcccgccaccaagcctggctaattttttgtattttttagtggagacagggtttcaccacgttagccaggatggtcttgatctcctgaccttgtggtctgcctgcctcagcttcccaaagtgctgggattacaggcatgagccaccgcacccagcaatcttgtttattgatatctcctgtactagaatataagcccctggcgggcaagaatcttggtttcatttgctgtttgtttggcacctggaacagtgcctgatacatgctggtgctcagctgatatctgctgaatgaatgaatgtccgggagttgagaccagaactgaattcgctggcccaggctgcttggggagtgagtcacgatggaagggccgtggtccctgtcgcagaggcatgggccccttctgagacctttgtgggtaaatgcattgatccaccctctgacctagctggcagccagcaaacaccccttgatttgaccagattctttccaatgcaccccccagaccttctgctcacctaaagaccagatccctgagttctggtttctgctgcttcttcttattcctgggaaaaggacgttaggatgagaggctcagggggtgaggctgcaaccagcggtcctcctccttcttctccagcccccaccctccaggcggtcagccctgtgctgagtctcacctcctcttcaggaagaaaatcagcaggcccacgaggatgagaaacaggaggatgcccacaaaggctccggcaatgacccctgtggggaggaggcatcgggaaccctcagagcgcaggtctgagctgctcatctgtctccaaccctgcccagcctttcctcttccccaggagcctggtccaaagacagctgacccccgaacatcacacggtgtgaattgcgtcggtccagttatacttacgcgcttacccatggattttcctccacccctgagacagcaagaccagcccctctcctacctcctcctcctcctccgcctactcaacgcgaagactacaaggaggaagacctttatgatgatctacttaataaatagcgagtacattttctcttccttaggatattcttagtaacatttttttctttagctacttgattataagaatacagcatatagtacggccgggcg[132 bp omitted]cgtggtggtgggcgcctgtagtcccagctactcgggaggctgaggcaggagaatggcgtgaacccgggaggtggagcttgcagtgagcccagatcacactactgcactccagcctgggtaacagagcaagactctgtctcaaaaacaaacaaacaaacaaaaagaatacagtatgtagtacatattacagatgaaatgtatgttgtttatgttattggtaaggcttccaatcaagagtaggctattagtagttaagttttgggggagtcaaaagttatgtgcagatttttttttctttttctttttctgagacagagtcttgctctgtcacccaggctgcagtgcagtggtgcgacctcggctcactgcaacctctgcctcccgggttcacgccattctcctgcctcagcctcctgagtagctgggactaccggtgcccgccaccactcctggctaattttttgtatttttagtagagttggggtttcaccgtgttagccagggtggtcctgatctcctgacctcgtgatccacctgcctcagcctcccaaagtgctgggattataggcatgagccaccatgcccggctgttatatgcagattttctactgtgtaggggacaattgttcaagggtcaactatccatcattttcacaggtgacctggttgctgaagagtgactcctggccaggcatggtggctcacccctgtaatcccaacactttgggaggctgaggtgggtggatcacttgagcccaggagtttgagaccagcctgggcaacataacaaaacccagtctctactaaaaaaacaaaagttagctgggtatggtggtgcacacctgtcatcccaactactcaggaggctgagcataagagtcacttgaacccgggaggtggaggctgcagtgagctgagattgcacgactgcactccagactgggtgatagagtgagactctgtctcaaaaaaaaaaaaaagaaaaagaaagcaaaacaaaacaaaaagaaccccaacaaaatagctgggcatggtagtacatgcctgtagtcccagctactcaggggactgaggcaggaggatcacttgagcctgggaggtggaggctgtggtgggcatgatcgtatcactgcactccagcctgggcaacagagtgagaccctgtctcaaaaaagaacaaaacgaaacaaaacaaaaaagtgattcttgccttccttagcttagactagtggttctcaacaagggtgattttgctcccaaagagacaccgggcaatgtctggagacgcttttggttgtcacagcttggaagtgggagtgctgctggcacatagtgggtgggaagcagaggtgcagctcaatatcctacaatgcgcaggacggcccccccacaacaaagaaggatctagccggaaacgtctgtagtgccgaggcgggggaaacactttgctggttgtgaaatcatccctggcatggacggcttctgttctccccagattgaggcttcatcttctcagaggtcctgctggctggggaaggactccccggcagcggagcctacccagatctggtggtgtcttttttttttttcttggtttgttttttgagacggagttttgctcttcttgcccaggccggagtgcaatggtgcaatcccggctcaccgcaacctccgcctcctgggttctagtgattctcttgcctcagcctcctgagtagttgggatgacagacacgcgccaccacgcccagctaattttttgtatttttagtagagacagggt[148 bp omitted]agttctcccaagatctgtcattagatgtctcgtcttagggtaggctcaagcctatggcccatcttcatcagccttgaaggcccccaagctgcagcttctcagcaatcctgggaagagtgtgtttgttgacagggaactgaagggtcttacaacctgtacgggagacttggcctcacagaatggacttggcctcacagaattggactagaggacctgttctctcagggatccttgttactaagggagagaactttctaagcaatggggtctggcaaagcccagttcaaacagcatccactggtcaccacatcaaccctcagtctctctccagattggagacccaatctcataagaaaccctattcctaggaagtgattgatggggcaaagtgaagcttatggccatggtcttggtacatggccaggtctttccaaagcttaagctccaaagtttttcaggtaccccattgattactgcaagatgatacaaccacattaggaaaaataaaacccggggtggggggtagttaaatgtatagttcccatgtgatccctcagttccactactgggtatagacccaagagaaataaaaacatacgtccacacaaaacctatccacaaacgttcctagcggcattacccataatggtcaaaagtggaactactcaactgacccatcaactggatcaatgaatggataaaaatgaatgggtaggccaggtgcggtggctcacacctgtaatcccaacactttgggaggaggagccaggaggattacttcaggtcaggagttcgagaccagtctgtccaacatggcaaaaccccatctctactaaaaaaatttaaaaattagctgggcatggtggctcatgcctgtaatccctgcacttcaggaggccgaggcgggtggatcaccggaggtcaggagtttgagaccagcctggccaacatagcaaaaccccatctctattaaaagtataaaagttagctgggcgtggtaggaggcgcctataatcccagctactcaggaggctgaggcaggagaatcgcttgaacccgggaggtggaggttgcagtgagccgagattgcaccactgcactccagcctgggcgacaagagtgaaactccgcctcaaaaaataaaaaataaaaaataaaaagttagccaagcatggtggcacatgcctgtgatcccagatacttgggtggctgaggcacaagaattgcttgaaccctggtagcagaggttgcagtgagcagagatcatgccactgcactccagcctgggtgacagagtgagtctcaaaacaaaaacaaaaacaaaaaaacaaattatgctcagtgaaagtggccagtcacaaagaaacacataatgtatgattgcattttttttgtttttgaaacagggtctcgttccttcacccaggctggagtgcagtggccccgatcatagttcactgcagtctcaacctcctgggctcaagtgatccttctgactcagcctcctgagtagctaggactacagacacacaccaccacagctggctaattttttaaaatgtagagatggggtctcactctgttgcccagactggtctcgaactcctgagctcaagtgatccttccacctcagcctcccaaagtgctgggattccaggcatgagccactgtgcccactctatgattgcattttaatgaaacgtcccagagaggcaaatctatagagattgaaagtggatgagagatttccgagggctgggggctggggaatgggagaactagggggtggtggctcagcggggtgagctttctgttgggggtaatgaaaatgttctaaaattgatagtgatgatggttgcacaatgttgtgaatataagaagagtcactgaattgtaactttaagtggtgagttgtggatggcgcggtggcccacacctgtaatcccagcactttgggagcctgaggcaggcagatcacctgaggtcaggagttcgagaccagcctggccgacatggtgaaactccatctctactaaaaatccaaaaattagccgggcgtggtggcacgtgcctgtagtcccagctactcaggaggctgaggcaggagaatcacttgaacccgggaggcagaggttgcaatgagccaagatcgtgccactgcactccagcctggacaagaagagcaaaactccatctcaaaatacaaaataaaaaagatgtttcaaaggaaatgagaaacaaaagagtcccactgatttcctcacaatggggcctgatggggtctaccgagaatttcatcatagctggctggcccgcgcggctccgctcacctgcactctcggtgtggcagaccacagagtgagacacgaccttcattccgtcccagatggtcgtgatggtggctgggtaggaccgagccggcccgagacccaacacagacacagcctccccacatgaagatctgtcctgggagccccgctgtcctcccacctccaactcaaaggcctcgtagcctccctgggggcaggaccagatcaagttgactccatagcccgctgaggtgctgacacaggaagtgatggtgactgtgtctgggtctgggtgaaggaagcaagaggtcagcagtgccatccaaggtggctttccaccccctccacccctacccccagttttctgagacgagcccatcccttcctcgccaaatccaaactacctcatcttccctccttttctgtcctccccgaatggacacaaataagtccttttaaactacaactcccatgaggccttgggctcctccatcactgcagctcatgaagtcatggcctgtggcctgatggaatttgtattccattcatctctcagctcgcaaggactgtgagctaagcccagttcaccacttgaaggcaggaaggggattctcacatgtggacgcacagaggctctgcgtggaactggctacgtcattcctctctgcccacacggtgaaattgtacaacgtcccgggttccagggcctccactttgtaccacgtctcattggtcctgctggtctggttgacccaattcgcttggggatcttgccccctccggggatgtcccttgctggcccactggacccagtatacgtacaactgagagtgggggtctccaggggccttccaccacagcatgactgagttcttagtctgagtttcattctggagatctgtgacctcattgggagctgagaagtgagaacagaggcctaagggggtatcctcgaagaccctcctaccccagcctgtctgcctctcccccacagcaaagctgagatatccattattgatggctccagtggctaaggaggctgaaccacaggaaagagtctagatacccaaagaccatggggaccagaatctcctagccctctccgtcccctggctacagccctgggtcccaccctgtcatctttctgttcttcccaaatgcacaccaattccacctactgaaactacagttcccatgaggctatggattctctgtatcgcttcagcttatgaagtcatggccccatggtgtgatgggatttgtagtcctccacctctcatggccctcgagatctgatctctgtattttctttcccacaggaaccccaggtagggtgtcttctcactctagacacaccacgtttgtagagggagctgataaatttcatctttttagcccaaatgaccaaggattaaagagttccaggttcaggccaggcatagtggctcactcctgtaatctcagtgctttgggaggccgaggcgggaggatcacttgagcccaagaattcgacaccagcttgggcaacataaggagaccctctctctacaaaaaatatttttttaaatgagctgggcatggtggcgcatgtttgtggtcccagctactcaggaggctgaggtgggagaatcagttgagcccaggaggtcgaggctgcagtaaccatgatcacactactgcactccagcctgggcaacagagcaagaccctgtcacacacacaaaaaagaatgaacctagtctccagagtgattttgatttttctcatgagtgggacccaccgtgcctaggctgagaggtggggccctctcgcttcatctaattccctgggaccagctgttggctattgtccagctggtgactttgtcagctcctgagaggtggtgctggacaattgagggctccccctgaccccaaagagtccatttcccaaagggagaaaaaacaggtcccacagcttggaaagccctgtctgctaagaaacgacacccactaggaacgggacctacaggtttaagctccggccggtgaggctggagaggcccatgggtactcttcatctcccaaggagctcccaaagtcctttcatctttttccttcccccatcctaatagggctgggttcagaaccgactgtgtctcaccagtggctgcagtgagggtgctgttatagcctctgacctcattcctctcggcccagacggtgaggtggtacaggctgccagcttccagttcctttagggtgatgtcagtacctgaggtgctttgggtcctggggtcagtcatgccttccctgacccatgagacccagtagctgtaggaagactggcctgggccctggggagctgtccagcgcaaagcaatggtgctgttggtccagtcctgcttgctgaggcttgtcactgcgttggggactgggagagggagcagagtcaggatttccacatcccctagtcctcaagagtccagaacacagtgatacgccctgtccttgtgcagcccagctcatccagaaacacttcctggcagggcacagtggctcaggcctgtaatcccagcattttgggaagctaaaccgggagggttgcctgagcctgggaatttgataccagcctgagcaaaatagtgagaccctatcgctactaaaaattaaaacaaattagctgggcatagtagcacatgcctgtagtcccagctactagggaggctgaggtgggaggatcgcttgagcttgggaggttcagtctgcagtgagctatgattgtgcctctgcactccagcctgggagacagagcaggaccgtctcaaaagaaagaaagagagagagaggccgggcgcagtggctcacgcctgtaatcccaacacttcgggaggccaaggtgggtgacttgaggccaggagttcaaggcaagcttgggcaacatggcaaaaccctgtctctactaaaaatacacagattagctgggtgtggtggtgcgtgcctgttgtcacagctacttggaaggcagaggcaggagaattgcttgagcccaggaggcagaggctgcagtgagctgagattgtgctattgcactccagcctgagtgacaaaggaaaactctgtctcaagaaagaagaaagaaaagaaggaaagaaagaaaagaaagaaggaaggaaggaaaagaaagaaagagaaaagagaaagaaagagagaaaggaagggagggaggaggggagggagaaaggaaggaaggagggaaggaaagagaaggaaagaaagagaaagagaaagaaagaaagagagagagacagaaaaaaagaaagaaagaaggaaagaaagagaaagagagaaaggaaggaacaaggagggaagggaggaaggaaggctttaaaggaaggaaagagaaggaaagaaagagagaaaggaaggaaagaaagaaaggaaagagagaaagcgagaaaggaaggaagaaaggaaggaaagggaaggaaggaaggggaagggaaggagaaagaaagaaagaaaaggcctgtgtccccacagccccacactcagcgggagaagtctggatgggctctcttcttcctcagggcagagccagcccccagctgtgattacatctgtcctgtggacttggagaggcagatgtctgcagagcctacggactacagagccagagcccagaagaggtgccacgccgctcctgctggttcttaacctctcaccaaaacagggagtggccgttgagggttcctacctgtggagatgctgacattctgcctggagccacgtgctccatttttttctgcccatacagagaatgtgtacaaggttccgggctcaagtctctcagctgtcacactggtatttgttgtgtttcgggtctctgtgccaccaccgtctccagtgtactctacccagtaggtgtagtcctgagggtatgggccatcggggacttcccagcatagggcgatggagctgttggtctgagtctccatatggaggtttctcactgggttgggggctgagaaagtaggaagaagatcctatgttgtcggagatacagaacagaacggggcaggagtgggcccctcactgccctcaaccatcttagctcttgttcaactgctggtgccagcagatgcagggtgtatgttctagaccgtgtttctcagactaatgtgccgggcgtggtggctcacgcctgtaatcccagcacttcgggaggctgaggcaaggggatcacctgaggtcaggagattgagaccatcctggctaacacggtgaaacctgtctctactaaaaatacaaaaaattagccgggcgtggtggctggtgcctgtagtcccagctactcgggaggc[133 bp omitted]aataaaaatctccaatggaatagcattaagaggtagggcccttgcaagattaggtcataaaggtgaagcctttatgcctggggttactgcctaagagaggcccaatggcccagcacagtttcacatttcatgtgagattacatgcctgtaatctcagcaatttgtggggctgaggtagggagattgcttgaggccaggagttagagaccagcctggaccacacagcaagacctcatctctaaaaaaaataaattagtcaggcatggtggcccacgcctgtagtccctgctacttgggaggctgaggtcggcggattgcttcagcccaggaatttgaggctgcagcgagctacgatcctgccactgcactccagcctggatgacaaagcgagactccagctctaaaaaaaagaaaaaaataagagagactcaagggagctttgtgtggtgatgaagacagtctctcactttccaatatggtaggcattagcaccgtggaggatgaaggggggactgggagcccctcaacaggccttttgagcacatgaaatgtgaaactgaatttgcagtttcatgcaactttaatgagtttaaatttaatagccacgtgtggctagtggctaccatattggacaatggaggtgtagacacagggagctgtccacatcagggtcatggagctgatgatctgagtttccatcctcaatatgtgacacagttgggaactagaagaagagtcagagggtcagagtgtccccactcacagtatctaattccttgaaagctcaggtaacatgccttggcccctacacattcctcttggtgcaggaaggtgccccttggcattatggtccacattctagagagtcctagacacagactggccccaacttagcagctggaggtaccatggacattcattccttcttcatctcctgagctgagactgccccaggatgtggacatgagtacctggctcaatatggcccagagggactatggaatagacaatcgtctacattctactgcttactgtcccttaaacaaataagagatcaaacaaatggcgactgcctctcacctgtggtggcatttcgagtctcccgggagctgttgattccattcttccccacccacacggaaaacacatacaaacacccgggttcaagtctatccacggtgatgttggtgtgtgctgtgcttcgagtccctgctctgccaccatctccagtgtactcaaccccgtaggtggagttctgtgggtctgggccatcggggacctcccaggtcagggcgatggagctgttggtctgagcctccactgtcaggtttctcactgggttgggagctgaaaaccagcacaggagggaaaatcagttgtagtttctggccctcaaactttccagcccttccttaaccattgcatccagcaggtggaggcagggaggcccagttctgcactgtccagtgtggcagccacgagttccacgtgagtgttgagcaccgtgaggtggcttttgtgaaatgagatgagccgttagtgtaagatccacaccggctttcgaagagttcgtatgaaattaagaattaagaatgtcaactatctgattgatcctatacacacacacacacacacatatatatacacatacacatatatatacacacacatatatatacatacacatatatatatatattttgtgggtatatactcagtgtgtatatttaatgatcctttccttatattgattacatgtcaaaatgataatattttgtatctgccaggcgcagtggctcacacctgtaatcccagcactttgggaggctgaggtaggcggatcacctgaggtcaggagctcaagaccagcctggccaacatggcgaaaccccgtctctactaaaaatacaaaagttagccaggtatggtggcatatgcctgtagtcccagctactcaggaggctgaggcaggagaatacttgaacccaggaggtggaggttgcagtgagtcaagatcatgccactacatt[139 bp omitted]ggtgaaacccgtctctactaaaaatacaaaaaattagccaggtgtggcgg[201 bp omitted]tttccttccttccttccttccttccttctttcttttttgagacagggtttctctctgttgcccaggctggagtgcagcagtccaatcagagctcactgcaacctctgcctcccgggctcaagcgatcctctcacctcagcctcccgagtaggtgggaccacgggaacacgccaccacagctacttttttattttttttgtagagacaggctgaccagtttctttgtacttatttttatgtggctgatagaaaattgaaattctcacctgtggcttccactgtgtttctattggactaaagaacctgtcacattttgtcagctcccaaccaccccctaccactgtccttataaaagaaataaaaataaaacagcggctgcctcttacctgtggcactagtgacaatctccacagagctatttactccgtctttctccacccacacagaacacgtatacaatgacccgggtccaaggccatccacggtgactctggtgtctgttgtgtttcgagtctctgttctgccaccatctccagtgcactgaacgcagtaggtcgagttctgtgggtctgtgccatcggggacctcccagctcagggagatggagctggtggtctgagcctccactctcaggttcctcactgggttgtgagctgagaaattaggaagaaagatctaatatgagcaggactacagaacataacgggggcagccagtgagctttttgtttgtttgttttttcgagacagagtctctgtctgtcatccaggctggagtgcagtggcacgatctcggctcaccacagcctccgccgtccgggttcaagcgattctcctgcctcagcctcccgagtaggtgggactacaggtctgcaccaccacacccggcttatttttatattttttcaccatgctggccaggctggtctcgaactcctgacctcaggtgatcctcccacctcggcctcccaaagtgctgggactacaggcgtgaggcaacatgcctggccaagtgggcatttttgatcatcagagttcctagttgtccctcaacagctggtgccagtagatgcagagtttatggtctagaccagggcttctcattctttgctgtgtgcacatctcacaggggaccttgtgaaatgcaggttctcactcagcagggctaggatggagctgagagactgcactcccccccaccctttttctcccccaccagtgtcacttgccaatgtatttccatcagctctcagagacccggatgctgcccacacatggaccacactttgagtaacaaagacctgagccagcgctttccaactgagcttctgcaacgatggaaatgctctcccaccttccagtatggtaggagaacagagaaggaaatggaagcccttcaacagggctttcaaacatatgaaatgtgaaactgaatttgcagtttcatgcaactttaacgagcttaaatttaatagccatgtgtggctggtggctaccatatcggacaatggagatctagccagagggagctctccacatcaggatcatggagctgatgatctgagtttccatcctcaatatgtgacgcagctggggactagaagaagagtcagagggtcagagtgtccccactcacagtatctaattccttgaaagctcaggtaacatgccttggcccctacacattcctcttggtgcaggaaggtacattctagagagtcctagacacagaccggccccagcttagcagctggaggtaccatggacattcattccttcttcatctcctgagctgagactgccccaggatgtggacatgagtacctggctcaatgtggcccagagggactatggaatagaaatccgctacgttctcctgcctactgccccttaaacaagtaagagcaaaacaaatggcgactgcctctcacctgtggtggcatttcgagtctcccgggagctgttgattccattctttcccacccacatggaaaacgcatacaaacacccgggttcaagtccatccacggtgatgttagtgtgtgctgtgcttcgagtccctgctctgccaccatctccagtgtactcaaccccgtaggtggagttctgtgggtctgggccgtcggggacctcccaggtcagggcgatggagctgttggtctgagcctccactctcaggttcctcactgggttgggagctgaaaaccagcacaggagggaaaatcagttgtagtttctggccctcaaactttccagcccttccttaaccgttgcatccagcaggtagaggcagggaggcccagctctgcactgtccagtgtggcagccacgagttccacgtgagtgttgagcaccgtgaggtggcttttgtgaaatgagatgagccgttagtggaagatccacaccggctttcgaagagttcgtatgaaattaagaatgtcaactgtctcattgatcctttatatatatttgtgtgtgtgtgagtatatacttggtgtatatattgaatgatcgtttttatattgattacaagtcaaaatgaaaataccttgtatctgccaggtgcagtggctcacacctgtaatccccgcactttgggaggccgaggcaggcggatcacctgaggtcaggagttcgagaccagcctggccaacatggcgaaacccagtctctactaaaaatacaaaagttagttgggcatggtggcacatgcctgtagtctctgctactcgggaggctgaggcaggagaatcacttgaacccaggaggcaaaggttgcagtgaaccaagatcatgccactgcactccaacctgggcgacagagcaagactctgcctcaaaaaaaaaaaaaattgtatctgatggactacataaaatctctcatagtaatttagtttgtttttcttttcttttgttttcttttgttttcttttctttttttttttttgagacagggtttctctctgttgcccaggctggagtgcagcggtccaatcagagctcactgcaacctctgcctcccgggctcaagcgatcctctcacctcagcctcccgagtagatgggaccacgggaacacgccaccacagctactttttaatttttttgtagagacaggctgaccagtttctttttacttatttttatgtggctgatagaaaattgaaattctcacgtgtggcttccactgtgtttctatccaactaaagaacctgtcgcattttgtcagctctcaaccaccccctaccactgtccttataaaagaaataaaaataaagcagtggctgcctcttacctgtggcagtagtgacagtccccacagagctatttactccgtctttctccacccacacagaacacgtatacaatgacccgggtccaaggccatccacggtgacgttggtggctgttgtgtttcgagtctctgttgtgccgccgtctccagtacactgaacccagtagttggagttctgtgagtctaggccatcggggacctcccagctcagggagatggagctggtggtctgagtctccactgtcaggttcctccctgggttgggggctgagaattgggaaggaaggtctgacaaaaagggaaccaggtcagtacaatccctcccaacccctgagctcacgccccaagtccagaaacaacggcgctcataaacccctaccatggaccactggaccccacggggaccccccagaggctcacggcagttgcggtcccacctcttcgagtgggcagtgagttcaggcaggggtcactcaccaggcgccctggcccctgtccagctgcacaggccctggagggaacccagagaaaacggagtcagcctctcaaccactcctccgcccagtgaggccgaggggctgggaggagcggctggtccccgccccatgagtcacccttgcatgggaaggaggggccggtgttaggctgggctgtcacgacctcgaccgtctttcctgggtcgaggagagaagggggagcatggcaggagcagagcttagggagctggggttggctccacccgataaggctgagagataaaattaatgatttcatttcctgaaatatatgtccttggaaaaccgagggcagagagcaatgaacagactgggaagggagaaaaaaaccaaggttggggatcaggaaccttggcctgagggtggagggcctgggggcctgggggcctgggtctgagggaggaggggctgggggtctcgacctctggtttgagggaggagaggttgggggcctggactcctgagtctgagggaggaggggctggggtctggactcctgggtctgagggaggaggggctgggggtctcgacctctggtttgagggaggagaggttgggggcctggactcctgagtctgagggaggaggggctgggggtctggattcctgggtctgagggaggaggggctgggggtctcgacctctggtttgagggaggagaggttgggggcctggactcctgagtctgagggaggaggggctggggtctggactcctgggtctgagggagtaggggctgggggtctggattcctgggtctgagggaggaggggctgggggtctggactcctgggtctgagggaggaggggctgggggtctcgacctctggtttgagggaggagaggttgggggcctggactcctgagtctgagggaggaggggctggggtctggactcctgggtctgagggaggagggcctgggggcctgggggcctgggtctgagggaggaggggctgggggtctcgacctctggtttgagggaggagaggttgggggcctggactcctgagtctgagggaggaggggctggggtctggactcctgggtctgagggaggaggggctgggggtctggattcctgggtctgagggaggaggggctgggggtctggactcctgggtctgagggaggaggggctgggggtctcgacctctggtttgagggaggagaggttgggggcctggactcctgagtctgagggaggaggggctggggtctggactcctgggtctgagggaggaggggctgggggtctggactcctgggcctgaaggaggagggactgggggtctggacccctgagtctgagggaagaggggctgggggtctggactcctgagtctgagggaggaggggttgggggcctggactcttggtttgagggaggaagggctgggggcctggactcccgggtctgagggaggaggggctggggtctggactcctgggtctgagggaggaggggctgggggcctggactcctgagtctgagggaggaggggctggggtctggactcctgggtctgagggaggaggggctgggggtctggactcctgggcctgaaggaggagggactgggggtctggacccctgagtctgagggaagaggggctgggggtctggactcctgagtctgagggaggaggggttgggggcctggactcttggtttgagggaggaagggctgggggcctggactcccgggtctgagggaggaggggctggggtctggactcctgggtctgagggaggaggggctgggggcctggactcctgggtctgagggaggaggggctggggtctggactcttggtttgagggaggaggggctgcttcctgtccgtgagcacagctgtgtgttgcctgaagccagtgtcccccgcagcagacacgacagtgtctaagggcccgggtgaagctggtgtcccccacaacagacacgacaatgtctaagggcccgggtgaagctggtgtcccccgcagcagacacgacagtatctaagagcccaggtgtaagactctcctacagtctctgccaagcctgaagccctcttccttctccaggggatcttcagcacctacttcctcaagatcgaggtgcaggcacccagctccttctccctcagacctgggagtccctgccttgggagcccgctctgggcggggagcacttaccagcagcaccaggttcccccagaccccgaggcccccgccagccccagccatgcctccagacactgccggggacccaggagtcccaggcctagtccttccacctgctggactttacactcaagaatttcccctttaccagatcattggtgaagccagaggccagggcgggaaggggaggaggaggaagtggaacccagctcccaaccctgccccgctggccctcaccttcctccctcaccgctgcctctagctctgacactggagatgcctcccatcctttctccagcccccagcccactccactttgtcccccgaaatctccctctgcaccccaggtaccgggtgccgcgccccactgctgcacggatgcgggacgtggggcagaggatgagagcagggggtgctgagagaaaggccagctgactccctcgcctccctggtgggtgatcacacatcaagagcagcctggggcttagacctcatgcccctcgtccctggagcacgctcttccattcagcctctgacgcctttcccctctccgtctcccacaagcccctgcagctctcacaaaatgagcccagcgggctcctgcctcttggcctttgcctagactgtctcccccaccagatgcacctgcctactttccccctaacagtctcctacccactgctccattaggattcagcttggaaatgacccatgccgggcctggggcctttctagcctggtcaggaccctgtgcactgtcttccacaccccagactctctaatttgcatatccatctgtgaccctgagcaaatgacttaaatccacagtgactcagattcctcatctctaaagaatgggcacccttgtaaatatgctaagagaaatagatgagttactacgtggaaagtcttggaacaatgcctggcccattttaaacagttgataaatattagtcatgtttatttttagttcatccctaggccacctgtgctcagaaggggcctgacacccagggcttttcaaggtgtttttgttgacttactatgtgcacacgtggactgccttcatctcacatatagtgcggaaatgaagaatagaaaccccagccgggcatattggtgtgtgcccagctactcaggaggctgaagtgggaggatcacttgagcccaggagtttgagaccagcccgggcaatatacaaaaccccatctttacaaagaaaaacaaaaagagagaaaaaattacccaggcatggtagtgcacgcctgtagtcccagctaccgggaggctgaggtgggaggatcacctgagactgggaagtcaaggctgcagtaagctgcgattgtgccactgcactccagcctgggtgacagagtgagcccctgtctcagaaagcaaaacaatggccaggcgcggtggctcacacctgtaatcccagcaatttgggaggccgaggtgggcagatcacctgagatcaggagttcgagaccagcctggctaagatggtgaaaccccatctctactaaaatgcaaaaattagctggctgtggtggcaggcacctgtactcccagctactcaggaggctgaggcaggagaatggtgtgaacctgggaggcggagcttgcagtgagtcaagatagcgccactgcactccagcctgggtgacagagcaagactctttctcaaagaaaaaaaaaaaaaaaaaaaaagcaaacaaaacagctgagcatggttactcacgcctataatcccagcactttgggaggctgagacgagaggattccttgagcccaggagttcaagaccagcctgggcaacatagggagatcccgtctctataaaaagtagaagtaaattagccaggcatggtggtgcacacctgtggtcccagctactcaggaggctgaagagggaagatcagttgagcccaagaggtggaggctgcagtgagctgtgattgcaccactgcactccagctggggtgacagagggagactctgtctcaaaattaacaaataaataaataagttctcacaccaccactttgagaagtcagtttctctgtctctgagagcctcagtttccccatctgtatacacaaaggtttggttgcgagaagtttcctttcagtgggcaccggatgtaattcatgccaatcacttgcttgggtttctgttttaacctttctctgtttctcgtctatatcttaaaaaaaattttttttttattgagacagggtcttgctttgttgcccaggctggtctcgaactcctagactcaagtgatcctcctaccttggcctcccaaagttctaggattataggcatgagccaccacacccagctgtctcccctatactttttgatgtctctctctctctcctggtcctcctcctcctcctcactgtctcttccctctatctctcttccctcccatctagatccccaacttataaacatgctcaccctccctgtctataaaaaaatgcatcacttacattgactccacacccaccgtcctaccacaccctacttgctttctcttcaaaacccaactcctcggccgggcatggtggctcacgcctgtaatcccagcactatgggagcccgaggcaggtggatgacctcaggcaggaggtcaggagttcaagaccagcctggccaacatggtggccatctgtactaaaaatacaaaaattagccgggcatggtggtgcatgcctgtaatcacagctactcaggaggctgaggcaggagaatcgcttgaacccaggaggggacactgcagtgagccgagatcgcaccactgcactctagcctgggtgacagagggatactccatctcaaaaaacaaaaagaaacaataaaaaaatcaaccactccacaaaatgacccacattccccagcttccaaagtcctcctggagcagctgcctgtgtatggggaaggcaaaccaaaaacaaaacctgtaggacctcggactcgggccctccaactccagtccctccttcagatgaatgcagccccagccaacatcttagcagcaacctcaggagagactcggccgtgctcctcttttccccttaagaacagaaatttccacggagccactaatgagagtcccattagcacgaccctcatcacctgagttcttttcaattcctcttacctgtgtgatgagaagcaccaagagagcgttgcttggtgtatgtaatgataccatctctaggtctggtgagcaggaaccagagtcaccacagtggggcagcagagggcctgggctcaggtttcccagaagcagagcctgaggcagggattcagatgctcatgaactgtttgagggtttgctttcagaagacagagagtgatgaaagcagtatggggcagaggaaggagccaagtgaggctatcacttcagagggatcccatcacagagacaggatctgaacttttaacctctaatctttgtctatgggcttctccaggggtgagagtttcatgactttcctagtaaaacacgttcctctcaggtcaagagcaagttttttgttttttttgttttgttttgttttcagatgaaatctcgctctcactctgtcacccaggctgaagtgcagtggcaccatcttgcctcactgcaacctccacctcccgggttaaaggattctcctgcctcagcctcccgagtagctgggattacaggcgcctgccatcacacccagctactttttgttgttgttgttgttgtttgtttgtttgtttgagacagagtctggctctgttgcccaggctggagtgcagtggctcgatctcagctcactgtaagctctgcctcccgggttcacgccattctcccgcctcagcctccgaagtagctgggactacaggtgcccgccaacatgcccagctaattttttatattttttggtagagatggtgtttcacc[137 bp omitted]tggccaggctggtctcgaactcctgacctcgtgtgatccgcctgccttggcatcccaaagtactgggattacaggtgtgagccactgcgcccagccaagaccaagtctcttgagaatgtggcatctgcaagcagccaacactgcttaagaatgagtgctcagtgcctgcaaaggagatctgggtgaagcaccagcgacgtccacccctaaagcctcacacctgttaccagtcctgagccagttctcagtcttggaaccccttccatgtagcggatgcttttccctcagggaggactcaccgatactagtcaaagtacatactgtaaaccttcctcccagtttctcctaaaggccaatatccatggtcgctggggattagagaaagagaaaaggctactggactctgactctgaatcaatcctaatttggaggcacacacaggtcaccgtgaatcatggtctgactggtgtgcttggggctgtcaggtaacgaacggagggttcacctaaagaccatcacacagtgggtcaacgggactctaaagaccctgtgtggctccttcctcaggccttgagagtgaagttgaaatcgacattctcataaaatggcagacacaatgctttggcttccctgatctgtagtgtgaaagctttgatggtgggaagaagaaatggaagcccctagaaattcccccatctatattgggccagtctttcattgctataaagaaatacctgagactgggtaatttataaagaaaagagttttaattggctcgcggctctgcaggttgtacaggaagcgtggtgctggcatctgctcagcttctgggaaggcctcagggagcttttccactcatggcggaaggtgaagagggagcaggcacataacatgtcgaaagcaggagcaagagagagaggacgggaggtgccacacacttctatttttttattttattattattaaatttttgagatggagtttccctctgtcacccaggctggagtgcagtgacaccattttggctcactgcaaccttcacctcctgggttcaactcccagctagtttttgtatttttagtagagatagggttttgccatgttgtccgggctggtctcaaactcctgacctcaggcgatccaatgcacctcggcctcccaaagtgctgagattacaggtgtgagccaccgcgcccggccttgccacgtactgtaaaatacccagatctcttgtgagctcactcatcaccatggggatggtactaaaccattcatgaggggtccatccccaagatcctaacacctcccaccaagtccggcctccaacactggggattccatttcaacatgagatttggtggggacacagatccaaaccatagtatcatccttcccaaacagtcaacccagggaatcacagagatcagcgccagcatcaagccttggaaaacacaggggtgggatatgggagggtgattcctaaacattatcctttgattcacatgattaatctatgcaggagcttatggatcttggaagacagaagtaagaaatggtgatactggccgggctcagtggctcacggctgtgatcccagca[231 bp omitted]tcaaaaaaaaaaaaaaaaaaatggtgataccctcggaagtggctggtcttctcagggtaaggtctccttcagcaaatcagcacagcccctggcacctgatattcagctaatgaactggaaaaggcgttttgcctatagaagttagcctgaatgaagagtgttctttactccaacagtgacagaaggtcagtgtgattccctttagactgtctgggacctcggtcatcttatcaacccataagacatcacgctgttccccctcactcctggatagcaatttatcctcactggaatggacacttacaggtgtttattaatttctcagtgatttgttgaatgaatgaaggaatgaatgaatgaatgatgtctttaccttgagattggagttctttcagatttgctctctgcccacctcaccagcctcttctcctatctttactccagctacacagatgtccgtgcatgtttttcttagcactccaggtggattcaaacctcagggcctttgcacacactgttccctctgcctggtaaaatatttctccaccagccagggcctacttctctttctacttctggttgaccccagatacagttggccactccctcctatgtttggagccaaactaaacaaatctcttattataatactcatcacattgtctgtggctttgcctatttttcctttcttttatcagagtggaagaagcttctttgggtagagacaagtctattcatcttgggggacatcaggccaactccacaccgaaggctgatgaaacttcaggcaatatcccttcatctgaatctgatgacgtgtgtcacgttttccaggtccacactcagggatctggtctgcgttttcatgtaagctttctccactctcactttccctggactctcatccaggattagatttttttttttcttttaaatggaatctcattctgtcacccaggctggagtgcagtggcaccgtctcggctcactgcaacctctgcctcctgggttcaagcgattctcctgccttggccaccacgcctggctaatttttgtatttttagtagagacgaggttttgccatgttgactacgctgttctcgaactcctgacttcatgtgatccacccgcgtcagcctcccaaactgctgggattacaagcatgagccaccacgcctgccgcgattagatcattgatctcattgcaggtgaaccagtccagacccccatccaggttttccagcttgctcgctcctcacgctgtggctgtgtcctgtgttgccgtgtttccgctgaatccagcccttgttttcgctcttcctggccttgcgggcagccaggattgaaagatccaggaagtgacaggggcctgactcatcaacttgtaagagagctggggttctcctagatccatgctcgcactgaggtgagaaatgagaagccagggccgggagcctcctgggggttggctgccaacgccaggcaggcggggaatggtgattttcgcttgtatcgtggaggatgccacgcacagacgtgaatagaaagagcctggaccgtgtcctgaggtcagcgactgaggtcctgggtggggccagccaggacctgcccgggggctactgccctctgaatcaatacctccagggaccctacgttgacacccatggcctcccactctccacccctcagtcctgcgtgcggcacgtagtgctcactgggcgtctgtgtagggggttgaaggctgaggctggaacaagggcgtggcggtcgcaggctccagggcacgacggtccttcctcttccccttctcagccacatctggggctccgtccctgcagccaaggctccctggcgctgtccttggtgctgacgcggttctggaagtgcggtgccagggtggctggtgcggctcccgatggaaaagccccaccaaccccacaaagcagactcgggagagaacacgccaccgtctttagcgaatcttaccaacccagggccaaagcgccctgcaccccagagcagcactcgtggtgggaacacaggctgatgtaataaacagaaaagtgactgcgggggatggggaaggcgggatgtccttagcgtcccatggaaaaaacatatttcctccagatg[156 bp omitted]cgtctctactaaaaagacaaaaattagccaggcgtggtggcaggctcctgtaatcccagctactcgggaggctgaggc[137 bp omitted]tgagaaaattccatcccccattgttcggaacccaggaatctgggcgctgtgtggttttccataaaaactggtatattcgtttgctagggctactacaacaaagagcatagactaggtgacccaaacagcagagatttgttttcccaccgttctggaggctggaggtccaagatgaaaatgtgggcagggttggttcctcctgaggcctctttctccttggcttgcaaatggccgtgttctcccttgtcctccatgtgtctgtgtcctaacctcctcttctgataaggacaccagtcaggttggattatggcccaccttagtgtgacttttttttttttttttttgagacagcatctcactctgtctcccaggctggagtgcagtggtacgaacacagctcactgcagcctctacatcctgggctcaagtgatcctcccacctcagcctcctgagtagctgggactacagtggcacatcaccatgcctggcttacatatatatatatatatatatatatatatatatatatatatatatatatatataatgtatatatatataaaatgtatatatatgtgtatatatatataatgtatatatatgtgtgtatatataatgtatatatatataatgtgtatatatataatgtatatatatataatgtgtatatatataatgtatatatatataatgtgtatatatataatgtatatatatataatgtgtatatatatataatgtatatatatataatgtgtatatatatataatgtatatatatatttatttatttattttagaccgagtcttgctctgttgccaaggctggagtgcagtcccgcgatctcggctcactgcaacctctgcctaccaggttcaagcgattctcctgcctcagcctcctgagtaggtgggattacaggtgcccaccaccatacccggctattttttttttttttttgagacagagttttgctcgtcgcccaggctggagtgcaatggcatgatctcagctcactgcaacctctgcctcccgtattcaagagattctcctgcctcagcctcctgagtagctgggattacaggtgcctgccaccacacccacctaatttttttgtatttttagttgagatggggtttcaccatgttggcc[131 bp omitted]ttggccaggctggtcttgaactcctgacctcaagtgatccacctgcctctgcgtctcaaagtgctgggattacagccgtgagccaccatgcccagcttggctaattaaaaaaaaatctggggagatggggttctcaccgtgctgcccaggaagatttcaaactcctgggctcaagcaatccatctgcctcagcatctcaaagtgacctcattttatcttaatcacctcttcaaagaccctgtctccaaatacaatcacattctgaggtactggaggttgggacgccaacttacaaatttttgaaggaggatgaaattcagttcataatagcagggatgagctttatgccccctgaaaaagacatacttccccaggtagattcatctgttagtgttttttgttttgttttagacaaagtcccactctgtcacccaggctgcagtgcaatggcacgatcttggctcactgcaacctccacctcccggattcaagcgattatcctgcctcaccctcctgagtagctgggattactggcgcccaccaccatgcccagctaatttttgtattttcagtagagatggggtttcgccatatgggccaggctggtctggaactcctgacctcaagtgatccacctgtcttggcctcccaaagtgctttcttttttcttttttctctttttttttttttttg[216 bp omitted]agcctcctgaagtgctgggattacaggcatgagccaccgcacccggccccaaagtgctttcaaagtattgattcaaaactatggcacaatcccaaccccacccccactgctcagaacccagggagcattgggtttggtagattccttcttccacacccagaataaattttctcagctccattccccaaatgatgctgacttgaggcaggggaagaatgctttggtagctcaggggaaaggactgtggagttcctgtctttccctcttccaagatccaagggtgctagcgacctttctgtgttcatggtcagaagcaaggagggagaaagaccaggaaccacacagctctttgtcatctcacaggcaggaagcatccaacagaggccagctctggggggcatgctgggccacatcatttttgccagtgtcctggaataaggaagtgtaggatagtgaggaaggcagaccgtggggctcctccctaccatgctcatcagggcatccaggtgagggatgaagctgtcctaaagtctttccagaactcacacacacgtgtccccacctctcccctccttgatcatgtctccattttacgtatttactgatcatcttctgctattgttaaagtctaagctgaggggtgaaaccacagcagaaagcaaggaaggctcgaccccagatcacacagggagaggtggacagacagcatggctccgcccatttgcagccatttctgggcctgtaggctctggcagctcctgggattgctgtcctcggtgctgaatacgcgtttgttgggggcacacctgacaagtttgtcattttcagggaaaacccagtctctctcggcgctgaggagaaaacatggcacagcccttctcagtcctctagcaaccctggactctgcaggagaaaagagagattccctacatttgtttctatgagagaagggaaggctggagcaggggagtgggggaaatctctgcagtcctctcggaaagcaaacccttctacacctgtgatcccatgtgatttagcagagccctgagttaaaactaggccatgatgacacttggtgacacaaacatctgacaaaagagctgtaccctttatattttcaaagactttctacaaattaaggaaggcagaagacccatttaatgggcaatggacttgaagagacactttaccaagaatatccaaatggccacaaacacacacacatacacacaaatgggaatgtgttcaacttcattagtcattatggaaattaaaccacaaggaagcaccagaacactgcagcagaagaactaaaatggaaaagacgaacaaccaactatctgcaagaatatggggcaaatgaagcttcctcacattgctggcaggatggtaaactggtaagctgctttgagaaatggtttgtcagtaactacgaaagcctaaggtacgtataccatcactcagcgattccactgctaggcagacatctgagggaaaaaacttcctgtgtgctccaaaagacatggacagaaatgttcatggtagcttcattcatagtatcccaaaactagaaacataaaatgttcatgaagggagggatgaaacaataagttgtaatacattcatgcgataaatagtacacagcaataaaaataaaaacacccagcatggatccacatttcatccacaatgttgagtgaagaaagccagaatcaaataactacatactgtataattccacttagagaagtttcaaggacagactacactaatttacgatgataaagatcaggagactggtcactcttggggaagggaggtacaaactggaggggagacaggagaacctgctaagatgcagaaaatttatttttttttaattttatttttgagatggagtttcgctcttgttgcccaggctggagtgcaatggtgcgatctcagctcaccacaacctccggctcctgggttcaagcaattctacaggcatgcaccaccacacccggctagttttgtatttttagtagagacggggtttctcc[143 bp omitted]gagtgcaatggcacgatctaggctcactgcaacctccacttcccgaattcaagcgattctcctgcctcaggctcccgagtagctgggattacagtcatgtgccaccatgcctgatttttgtatttttagtagagacagggtttcacc[139 bp omitted]gagcacagtggtgcgatcctgactcactgcaacctccacctcccgggttcaagtgattctcctgcctcagcctcctgagtagctaggattacaggcatgcaccaccacgcccaggtaattttcttgtatttttggtagagacagggtttcatcgtattggccaggctggtctcgagctcctgacctcaggtgatccacccgcctcagcctcccaaagtgcagggatttcaggcatgagccacctcgcctttcagcccacacaatgaaggtttatgaagccccagattccagggcctccaccacaaccccatctctgccacacttctggtcccactgggggccgtggtccctgcccactggacccagtaggtgtaggtgtgggggtctgggccccggggggatatacaccttagtgtaacagaactcagggtctgagcctgtatcctcagatccatgacctggccgggtaaggaaaggaagggaagggggtcagggttcctgcaggaaggttatctgagtggccttaaacagacccagttgtctcttacttgtagttctcaagagtaacagtagaatgtgctgggaatgcaacatccggagatatggagggactggccaggcggcctgggctccattcctgcctgccctagaaacaggatgcccttcaatgcttgagcccggtgactcaggtttcccccagagtagaaaacccagggctgggtactttttggggtccctcagctgccatacaagtgaggcacacacagttgtgaccctatcctccctaggccactttcctaagccttgggggaccagcttacaacggaccctgggattctgctgtcccttgctgcccatctgtgagaaacaagcccacttcatgtaactttttgcgtgtggcgttctgtctcatcactctggcaagttggtaaccagtgcacagtgaacctgcttcacagaccacaccccatagtccctgggcctccagagcaaagggaagcatcccctccttcccacagccctgcttgctctggaaggatgcaccctatcagtggggccgatgccagaggcctcctgaggcctcctactccccaagcccagagtgctctcacccctcgcccgtggcctctgtgagcgtctggctggggctgttgacctcatgcttctgggcccacatgctggggtactgcgtccctgcagccaggccctccacaggcaccctgatgtctgaggagtcactggcccagcagagccagtaggggcaggtcttggagtctgggcctgcggggccctcagggtgagggagctggtggtctgagccggtgtgaccaggccagggactagtttgggaatgtggaaaggagagagtcatttgataaagtttgtttgtggctctaatgagaataaagtgcacagcctggcactttttacaaatgtgcacacgcacgcacgcgcacacacacgcaaacacacatgcacacacaagtgcacgtgcacacacacgcacatgttgctgggcagtggaaaggtggcccctcttacctgtagacatgctcaggacgtccctggggccacctactcctttcttcttggcccacacagaggtggtgtagagggtcccaggctgaagccctccaccacgagccagcagtgtgacgtgcttgtgttcccgctggccatgcccctggacccagtagatggaagtctgccggtctgggcccttggggctgcccagctcagggtgatggagctggaggtccgagcctccacactcacgattctgtctgctttggcggctgacatgggtagaagcctctgcggcaaacagaagacggaatcccacggcccttcctagacgtgcaggatggaggctgatggggtcactaacctgctgctgtggcctctgtcgtggtcccgagggcctggggagggcccagatggggaatcagacccacggtggtctgacctgcaggatcgggatgaaggctgctgagtcccaccccgcctcatccccaccagccaccccggcttgggagggaagatggagccggcgttttgccccttgccccaggtctgggtcccggcagggctggaaggagcctgagagggatgtgcgcagcacctccgagagtcccgctttagagaaacacgaatcagatcatgagaaagcagacctctgagaagtcagatgaaaggtcgtcgggggaccagaatcagggaggagggacacgacgctggggctgctggatgccgacaggagagcagcgtcccgtcgctctggactgccgaccccacagagcccagggaccaaaagccagaatgttccccaaacaccagggattatgggcccagcccctcctccctcagactcaagagtccaggcccccagcccctcctcccacagactcaggagtccagcccctcctctcccagacccaggagttcgggcccccaggccctcctccctcagactcaggagtccagaccccagcccctcctccctcagacgcaggagtccaggcccccagcccctcctccctcagacccaggcccccagcccctcctcccccagacccagaagtccaggtccccagcccctcctccctcagactcaggagtccagacccccagcccctcctccctcagacccaggagtccagacccccagcccctcctccctcagactcaggagtccaggcccagcccctcctccctcagactcaggagtccaggcccagcccctcctccctcagactcaggagtccaggcccccagctcctccctcagactcaggggtccaggccccagtccctcctccctcagactcagaagtccagggccccagcccctcctccctcagacccaggagtccaggttccagcccctcctccctcacctccaggaacccctcatgtctgcaggccccacgtgcccctggaatctgcacacccagacccccgtccctcctgctacacttcactgcgcaatttcctctttccccacctttcgccaggtctgagtggagagggtaggagatgaggaggaagtggaggtttcgaacctgagtccaatccttcagatcctcctcatgcctgacccttcctcaaggaaatccctcagcttccacttctcctcactccaactgtggattcctgtcctcactttccttcctggtccccgtcctccaggctccccaccttcccttcccacctctgtactctcacatctgagtccctaaatgcaggtcatggatggagaagtcacctctctgctgtaagagtccctaaatgctggccatggatggagaagtcccctctctgtcgtaagagtccctaaatgcaggtcatggatggagaagtcacctctgctctaagagtccctaaatgcaggtcatggatagagaggtcgcctctctgctgtaagagtctctaaatgctaaccatggatggagaagtcgcccctctgctatgagtcactgaaagcacatcatggatgcagaagtcaaatagggtcttggagagcagcttggaccctgtcaagtcttcagatgcagaatctgaggacctgagggatagcagcttgccgaggtcacacagccttgacaaggagcacagctgggttcctccttcccatttgattcctacccccttgccgccctccctcctccaagacccctcatcctcaagcctcccacccttctcccgatactgcatgtgactgcagcgggttgtatcccctagaaagatatgtccaagtcctaaccccagatacctctgcaggtgacactacttggaaataggggctttgcagacatacttaaggatcttgagatagaatcaccctgggtttagggtgggccctaaatccaatgacctgtgtccctagaaggatgcggacacagagggaggctgccagttgaagacagtcacatgaagacggagagacacagccacaggccgatggaagccagggattcccgggagcctccagaagccgagagggcaaggacggattcttccctggagcctcaagagggaccatgggccggaaaacacccggattttggactttgggtctccagaactgcaggagagtccattcatcttgtttcaaagcatctggcttggggtaatttgtgacagcagcctcaggaaactaacacaaagaccaaacagtcctcttggctcagttctgcacaatcctcactttatccccccgaatccccccaccagagggccatggagggtcccactgggcaccaggcctggtccatggggagcgacaaagaaccttctgctgtcattaaccgcgatggtttatcacaatcatgaccctccccgaggcctctcctacggtaacagcaacatctacggttccacacccacagggaaaacggattcagagcagcagcagggggcgggcaggctgtggggccgacagtgaacatggaggcaggctggtggctgggagggctccatgtgggcctggctgaggagccagggatctggagtcagaaccgggggaaggcagctggaacccagtagtggacttggaattccgcaaatcgtcctcaaacgtcttcagccagaagcgacggcggcagcggcgcctgcagacaggcgtcaggaagcttcgctgctgagggtatttctcaggctgggctgggctgggaggcccaggtccttgcaggaggagagggcctgaacaccggcccttcaagctccctagtcagtcagtcttgggcaccgggctcctgagggctgacagtgtgatgaggagctgggcagcatagtaggtggtcatgatcaccaggtgggcatggggcaggggctgggcgaaggtgtcccaggccagcacgccatcagagagcgtgaagagcagcgcgccccagccggcactcccgccctgggccaggccgcgccacagcatggccatcaggatcagcccataggctgccaccggcaggaccatatccggctcgaggtgctggagcacaaggctgaggtaggggccaggggccaggatgatgagcagcagcaggccgggctgcaggggagagaagccgaaggcccagacgtagaggaggtgggcggtggcaaaggcggccatgcctggcgggagaggggtggggtaccagtgaggaaggcccatcctgggaatggccccgaggtcacccctcagggcctaagagaaggaccatcccagagcaccaggccccaccctggccgagcctccttgcaggtctccccacatgcagtgtccatccttgctctgctcagaactgccaggaggccccaccttcccttggcctccaaagccccatggcctccagctctccagccactctgcgccagccaccctggcctgctgggctacaagcacctgacacgtccctgccccggagcctttacactcgcccttcctccacacaggcatacagcccttcagctctgcccaaatgtgacttcctcagtgaggccttcctcagcaaccctgcttcaaactgcagtacctccagcaggtcctcactgccctctgcgccacctcagctactgccctaacaccgcctgcccccacccctcgctggagcgtgagctgcctcggtcacggctgcgccccccactgtgcctttgaccactggagctctcacaggagccctctgcacccaggctcccatccaagtgctggggcctctctcacacgggcatctggaaagcgtcacagcaccttccactcaccagggacgaaggctgccggccagatgaggcaagcgtcccccacagccgagcacacaagggctccctggaggagctgggtgtagcccccgcttggggacatgacccacaggaacccagccaggcagaggacgggcaggcacttgaccagggcagcgaaccaggacagctggtcctcgggaatccagaggcagaagtacacgcagcaggagaggatgaaggggctcagccacctgcagacatctgggcgctttggggagtggggagctactgagccgaaacccagcccagcccccattcttgggactcagatctcatggctcctgtcccacccccacctgggaccccagctgtacaggctggacccattcagggaccaggctgccagaacccagcttcccagggcccaaccaactcaaggacagcagctcccagacccgccggctgctggggttccagggccctgtccccccagccccaggcacagctcagaaggctctcacctgggctgagcagtgagtcttcagggtctgccccgctttgccagcgtccatgctggcctgatagccccagagcgacctaatctgggagcgagtggcttcagggggtggaggggagggctcatggttacacgttaacccaaggagcgtcctgtggactctgtgactgataacagggcccagggagatgttgtcctcaccctggggatggccctgcctggcgcccgctgataaagcactgttggcactgggggtccctctgccctagcctgctgggacatggcttcctcctcctatctgcctggggaggttaggcccacaaatgcctgtccccttgtcctgggccccaacaatcagaagagatggggtgcagaattccaacagccaccccatcatgggaagcgggagaggggctggctggcaggagtgcccctggagggatgggaaggcgagtctgtccttcacttgctgccctagccgtctccctccctgctccatgaaacctttcctcattctgctcaaccccaccaagccctcaggggctccaccacaaacactgcttcaatgggtgaccaggagggaccaccacgaatgcggggaacaagcaccctctcctgttagctgagcgagcccccaggtgacctccaagccaactgccaccccagtgaggacgctgtcctcatggcccggtccacacgctccggtttcccagcgccgctcaccggtgccactcgctgcacacgcagcctacacttctaccttctacctgaaagactcagacctactgggcgccagtacccagcctcaatgctgggcttggttactgggggtaagcaggggcaggagcagggatttgagcctgtcggtggcttctatcctctgcccaaggccctgcccacaggtggggtagacctggcaggagccctcacagccagtgcctggcccagcctggggcctctgcagccacagggctccctctggcaggacagtgtgggggcagactgggtcaggagcacccccagcctctggggtgcagggataatacaggctccccaccccgcatcccagaacgtaaggtctgaccagcagaatcgtaaactgccttcctttatttatatttgcaatatgaaatagaagctcggcacaaacgcacgcacactcacaccagcctgggaggagggagctggggacaaggtcacttggcaacagggctgggacctcagaccctcaaggcccctggggctgttgccggggaggcccctgctccccagagccggactggcctggttgaaagtgcagggtctgggcaaaggcacggcccccactcgggaccctctggcacccccacccacgctgggccgtcccccatggtggacctgagctaaaaggccgggtgtgggcgtggccgtctgcgctgcagcgtgggacagctgggcacgtgggtggcaaccttgggacccctaacaccagctcccgctgggacggaacagggaaggctgtgctttggagccgccagcccagttcggtgtcctcactctctctcgctctcctccctctctctatataatatataatatatgtttctctctctccattctctctatttgactctctgtatctttattctaggaggcaacgctccaaaacttctcttctcagtgcaaatgggggtgggttgggcctgtctccctggcaccagcctcctgggggtccagaggagagaatgtgggggtgtcagggtgatgagggcaatgggggccatcgtgggacccgccctgcccccaccccgggagatccacgggaggacggaagatttggccgccgctgccgcaccaggcagctatctggaaacagagggagatgtcgtgtgagggtctagcaggcccagccccacctacccagcccgaggctgcagccacactcactgggagcctggggatgcaggcccttccggggcagagccattgggtatcggaggaggcgtgagggcctgggcactgtcaggggagagaggggatgtgcagaggtcacttcctgccccaccagccccacccccacccccccgccctgctgccctggtgctcacctctggctttggggaagccccaagggctctgggctcttctccccttctgtggtctgggggggctggtgggccccggaggctgggacagaggtagaggggtctctggttgcactgtgggtgagaggcaggtgcggctgtcagcgtggcccccaccgtcacctgctgacaccctcacatcccacccgactgaagtcggctcactgggtgtgtgtctgccacctgccccacggggaggggcctcccgaggacgcagctggctcagcgtggagggacagcacagccctggacaggaagacaagcacccctcttcccgcctcctgtccctgtggaggaggtactcgaggccggctgagacagccccaaagggtcttctgcatgctctcaccctcccaatccttcacaccctccaacgagcccttcccaaccctggggctcaagggccccaagcatcccaggctactaagagaagaaccagcctacagagtgcaaggggctggggcacaacatgaggctgcgcctgggggtcctgcaaaggaggcctggagcagctcagggacaagatgaacccagagcccacctcagcgaagaggagaaaagacttctcccgatactaggcagccccacctcgctgctcacctgtccgaggagctgggggcagaacggatcccgtggaaggtggcctgaaggtccccgatgctaaccaaggcctggcaaggggctgtgggggataagagatctcagctgcagctcccagcaagctcggagctggccaggctgctctctctgcccagggccgcgggtgggcagggcaaagcggggctcacctgagggctccgtgactttgctgccttctgtggcttcctgaggtgctgaggggggtgtggggtcctgagacctggtaggcgagagaggcagcccaagggggcagctagggttagcactcgagcctatgagaggacggggaccccatggccacctcctggcctcgggataccagcaccatttagcccgttccatccggttctcacctgagctgcagggcgtcacgggcaggagggctggccaggctctgagtggggaggccctggggcacactgaggggcccctgtggggctggaggcccagtgtgcagctcttcctccccggagactcgggggctggtcggggcatctgtaggcactgggtcaaaggtggctgtccagctggggcctgggatagaggtgggggagcgggatggagggtgaactcagtagcaggcagacagccctgtgtacacctgaccacaccgcccattcattcacctggaggctgagggccagggctggggtaggacagaggggtggcccctccacgggctgcacagccaatgccctcctcgtcttcctcctcctcctcgtcctcctcttcttcgtcctcactgtctgtgctgcctccactcctgccccagaaaccacctcgtcagctagctgtgtgggacagaccggccgacacccatcctgttccctgcagcccagggtcagcccaaggagagcgggctgggatgacaggcaggtcacagaagggtccagggagcctggggtgtgacgacaccaggagaggctgggagagggagttctgagccaacggcaagaacacaggcgggcagggacagaatgcggccgtaaggagaccgtccgtcgccagtcatccgtggagggcaggccctggggaagtgggctgagcctcagccatggcaaccagagcagacagacccactcaccagctctcaagccacctcccagccgtcacctcacacggtcaccacagtgacaggccttcccaccagcaggcccaccctctggacagaggcttcacactactctctccctccaactagaaactccaagaaggcagagatggctgagttttgccactgctgtatcctcagccctgagaaaccaccaggcacccatagctgctccaaaaacactggctgaatgttgactaacacacacctgtgagcatgaagaaaatccaagcaacctacgtgctgatcaaccggggaaggggtaagcaaagtaacactaaaactaagctttaacaacgagggtgcactctgaaaaacgccatcattaggcgattttgctattgtgtgaacattctagagtgcacttacacacacctggatggtggcgcctcctgtacacctaggctctgtggtatagcctattgttcctagactaccgacctatacagcatgttacagtactgaatactacaggcaattctaacaatggtaaatgtttgtgtatctaaacataggaaaaatacagcaaaaatagaggattataatctcacgggaccactgtcatatgtggtccatcgctgacccaaagatgcagtatgggactatatactatgtctaaaatgctgacccaatatttttgtcttaacagagtaactgactactttaactggaaagtaatatatctgtatatagttaaaagtaaactaaaatactcaacgactaaggagtataaaggaagcccctcaacctaacataaggcatctacaaaaccccacaactaacagcatgcttacatggcaaaacgctgaatgcttccccctaagatcaggaacaaaacaaggatgcctgttcttgccacttctgttcaacattgtcccggaggctagccagggcaaccaggcaagaaaaggaaattaaaatcatccagatttgaaaggaaggaaaatgaactctattcacatgacatgattctgtacatagaaaatcctaaggagtccactaaaactatcagaactcatacattagttcagcaaggttgcaggatgaaagatcaacatacaaaaacctattgtattttcatatacttgtaacaatctgaaaacaatttcaagaaaattccatttacaatagtaacagaaagaagaaaacaggaataaacttaaaagaaatacaaagcctcatactctaaaacctacgaaacattgttgaaagaaattttaagacctatataaaaagacatccatgttcacgtattagaagacgcaaggtggcttcttggttgaaattgacaagctgatcctaaaattcatatggaatctcaagaaatcccaaatagggcaaaacaatctttaaaaagaagaacaaggttggaaaactaaaacctcccattttcttttttctgtgagatggagtttcgttcttgtcacccagactggagtgcaatgaatggtgcgatctcagctcactgcaacctctgcctgccaggttcaagcgatattcctgcctcagcctcctgagtagctgggattacaggcacccaccacagccggctaatttttgtatttttagtagagatggggtttcaccatgttggccaggctggtctcaaactcctgacctcaggtgatccatccaccttggcctcccaaagtgctgggattacaggtgtgagccaccgtgcccaacaaacctcccattttcaaaacttactataaagcaacagcaaccaggccagtgtggtactggataaaaacaacacacagactgatagaacagaacagagagggaagaaacaaactcatacatatggtcaaatatttcctttttacacaggtgccaagatgattcagtggagaaaggacagtgtcttcaacaactggtgcagggaaaactggttatctatatgtaaagggatgaaggtggaccacctcacatcatatacaaaatttagctcaaaatgaatggaaaaccatagaaataatgctataaaactcttagaagaaaagagagggctaagtcaagatgctggatttggcagtgacacacttgtgcaccaacaacacgtgcaagggtattcacagcggccgcactcacagcggctgcactcacagcagcgagcaacaggaacctgcccaaaggcctgtcaactgcagaacaagcaattcagctgcagctcatcatgcatggcactgccccactgcacgagagccaggggcacccaaacacacaacagggaaggagctcacaagcagagtgttgagcaacagaggtcagacataaaaggagatgctgtatgctatatcaagtgaaaacagagacaaaactcatctacagggttagaagccaggacaactttaccctcagaagggaggatactggctaacagaggggatgtgggtactgggaaggtcctgctcctgggtctgggcactgaggaaggatatccattggccacacactcaggatctgtatgtacacttgtctatacgcatgttacatgtcaataaaaagtgaaaacagcctaattccgaaatcaaaagtcatgagtcaaaaactcagttgcagatgatgacttagtgttcaggctgtcaaatctacatggcatgaacccatttcatcacagcgactctggggccggccagtattaagagaaaaaaaaaaaacaatgtaacatttgcactaaaatgtcatcacagcctgattggagagggacgtcatcatctctcattttactggaattagagaagagagaagctgcctgggaccatcttacccccctttctaggaaaacgtgtgagagctaacacgaggaagtgaagtgaagggatgaaggaaggagacagggaggcgggaagagagagacacacacagaccaagccatacctcaggacctgcctattttttcagccacagagattatcccttt[136 bp omitted]cattctcctgcctc[223 bp omitted]ttgagaccaggtctctgtcacccagactggagtgcagtggtgcgatctcaactcactgcaacctccgccccccagggtaaagcgatccttccacctcagcctctcaagtagctgggactacaggcacacgtcaccacatccaggtaatttttgtagagacagggtttcgctatgttgcccaggctaggtctcaaactcctgagctcaagcgatccatccaccttggcctcctcccgaagtactgggattacaggcttgagccactgtgcccggctaatttgttgatttcttaatgcatcatctacctttttttttgagacaagtctggctctgttgcccagactggagtgcagtggtatgatctcggctcactgcaacctctgcctccctggctcaagccatcctcccacctcaacctcccgagtagccaggactacaggtgcacaccaccatgcccatctaacttttgtattttttgtagagacaggatctccctatgttgcccagggctggtctcaaactcctgagctcaagcaatccatctgccctggcctcccaaagtactgggattacaggcactcagggattacatgagcccaccatgcttggccttgaattagatttctatcactcaaaagtgaaagtgcccccaactaatacacacaccaatgcaggttccttattttcttcattcacttcagcctcagtccaaatgtgttggggggaccccttggccctgccgtgtggtggaagcttggagaagggaaactggagggggactcaccggacaccaggtggctggcccagacgggcccccctggccagctggctgccctgccaggcgccatcttctccatcagactcccctgagccctgggcctcttcctcgtcctcctcttcctcatcatcatcaaactgctggatgcggtccttgtagcatatctcaagtaggttggcgttgggctgcagggcacaggggtgggaggatgggccacactgcccacagccccacacccctccacccgccacaaccaggggacagggcagtactcacgttctcatcgtcagcattgagggagaaggtgatgttggctgtcttgtcaaaaggtgcgctaggagagaaggcaaggcatggtgagaaggtccacctgggggtgggggcagcacaggacaggccacatttctttcttcactcaacacagagctgaccctcattacttgcagatttggtatctgcaaattcacacacaacccgaaccactggtcctaaggggcaacgcatacatgaatatcaacatctcacatatgatcactttaaatccttaaaaccactcattgaggtaggctgtttcccttggctctagaagtgagaaaatggggctcggaaatgttaagcgactctcctcaggctcttccaaggacaggtgccagagagggattcagatccatgcccttgtccccatccttggggcatctgtaggaggctgacactcacaccagccaggcacaagcagaatgtgagactacagcccaataaagcacatcccctaacctcaagatgtctacggtccgcggctgaaattctaaattatgggaaaaagaatcacgtcaaaacttaaactgtgcctgccagggccccacctccctcaccacgagggtctaatgatcagggtccacattctgtcccacgtgttacggacagttcaagggatcatttgtctcaaattcatgaaaaattctgccacaaagatcaatggataaaggacagttaattcttaaaggacactaagtatgtgacagacattactcacgcacttcattctcacaaccaccttccaaggcaagtgtccttagtccctcctagacactgagaagcagcggagcagagaccacgctgggcacacagtgggtctagggcagggcagcccatgtccccgtggcactggcagcctcagctgacctggcttctgctacaggagctatgcggggcagcatcttcagccttgagatgatcaaaccagtcatccactttccattccggaaatctttctgggtttagttttgttcacttaacttcttaacccctctggaattttcttggtagaggaaaagctaacagtttcatcccgaaaggggcagctggtgaccccaatgccatctaccagtcagtcccttcattctcctgccagggtggggttttcttctttttttttttaattaaaaaagcagagatggtctcacaatgttgcccaggctgggctgaaattcctgaactcaagcgatcctcctgcctcggcctccctaagtgctgggattaagatgtgagccactgtgtccagcccagttttcacttgagcatcttctccaggggtctcggcacaggccactgacccacaaagaccaacgctctgcaagtctccatgctgggcacagaagcagccaacacaggatatcacgtctgcatctgagaggacctctgtccagctgtggactaagccaggaacagctgactatccctcatcgtggtgtcccttacgctgtgctgtacagggaccccggggcagccatgggcagccatccagctcccacacactaaccagctatgtcctggggcctcagtctccctggccgtaaatgagctcatcgtggggagcaagacagagtctcgctctgttgcccaggctggagtgcagtgggacaatctcggctcactgcaacctccgcctcccaggttcaagcgattgtcctaactcagcctcccaagtagctgggactacacgcacctgccaccacgcctggctaatttttgtattttttagtagagatggggtttcgccatgttggccaggctagtctcgaactcctgacctcaggtgatctgcctgcctcggcctcccaaagtactgggatcacaggtgtgatccactccgcccagccacttttttctgactccagaagcaacagatgcttgtggcaagaaactcagaaaagttcatgatcataacacccagaggtgactgatattaagatgtggttgacccacaaatcaaaacaagcagaattggtaattggaaaaaaaaagttttgttaccccgaggcctgtggaggggaaaactggacccccatgtctggcagactcctgagccagagggcatccatggaggtgcagctctgccccacagtccctgcgccaggactgctggtccccactaccctgagcccctcccgcctggaacccctaaggctagctccaggagtgggagggacccgctctgtgtccccagcacagaagatgtttgtgccccaccctcatggcctgcctctcggagagaagagactgcagagctggaactcatgtaacaggaggcagacacacgaggctgcagacacacacacaaggccacggccaacgcgtgcccaggaggggccacagctgcaggctgagcccacagggcatgtaggtgcgtgcaggggacagatacaagtaggcgcgcctgctgctgcagaggcaggacagggctgtgaccctgcgcaggagacactcacttcacactctcctcctgctccccaaactcctcatcattgaagccgaagtggtcaatgaaggcagaggtcatgcgctgcatctggaagtccatgaaggcctgtgggggtgcggaggttagggctggagggagttgggcaggaccccactccagcatagcccagcacagccccacatagccccacgcccacctgctgcagcacagcctcctcagggaagttgaactccttgagccggtcgtcctcatcgtcactggaggagtgtaggtggtgggtgttcacctggggagaggagggggcgtcagggcctgctggagcccccagaccagggtgggcaggcagctatcggtggcggtgggaggctaagactggcccaagagagagaagcagcaggaggagtgcaggaagagaagctgggcctcaccaggtccaccatgttcttcttgttggtctccgccaggggccccgatacgaaggcttcccactgctcctgctgctcgctgggcagctctgcttaggtgagaggggtgaagacgtgaggcatctcggggcttcaagccccccacctagccctcaggccggcctggggaccctcacccttcagcagctgccgcagctgctctgcattgggccccttctccgtgttctgcaccagggcaccggccactcttgtcaggtgacccatgtagcctttccgagggcctcccgcacacctggcaagagtgaaggccgcggctgcaagccaggactggacccagggatgcccagccccagcccggccccccatccaggcagccccagcccctggagacatgaagggcagcaggtgctcactgtacacggtcgttctcctcccaggacgtcaggatccgctccaccaggcggcactgctgcagcagctgcgggagagcgggacaggatggcctggaggggtggtctgcacacatgtggggagctctgcactgcagcaggggtcccttcctcagcagatgcttcaccaggcccccgctcatccagagacggggatgggaaggagggatgcaagctggggcttgggaccctggcatccacccaagtctctctggtctttctacaaaagaatatgtggtgcatacacacacacacacacacacacacacacacacacacacacacatgcatgcactaacggacacacacatgctcacacatacatgttcacatactcgtgtgcactcacacacatacatgctctcacacacgcttgcactgacacatgctcacacacgcacgtgtgcgcactcatgcacactcagctgctcgcaggtctgctcccgcccacccctagctcttcagctcaagtcaggagcccactgctccctgcacctgcatgtttcatccgcgtttctccctggccatgcctcccacaccccatctgggcgctggcacctaacactacccaacaaacacttgtgggaggaaggagtgaggggtaggcctctggagagggtgcgcccacaggggatgggcccagaaggagggggaccagggagtcccagctcacatgtttcacaacagggttttggatgggcgtctcagggctgctgtcaggaggtggccccaagctcagcatggtgctcacgcatccctctacttgggcatgcaagaagttgttgaagacataatggaagaagaggtcctatgggaggacacaggattggtaccagagaggccccgccccagccgagcccccaacccctgagcccccagccgagcccccaccccagcccccgaaccctcagcccagtccagtccccgccccagcccctgaacccccagcccggtccagtccccgcaccagcatggtgttgggcacgtccagtgccaggagctcgtgcgtcagggctgcatcattggcgctcagggcactggccaggagcttgaccacgtgcagccgcgtgttgcccagaggcggagccagcatgccccatgtcatctgtagcggctccagctgcagacacagggaggcctgattcccaagggctgcccttcctgcttcccccgcctccccgaggaccagaacccacacccctgaccttgggaggctccagcaggagctggtggaagcagctgagccgcgggcgtagggcgtgcaaggcgcccacactggacacagtgctttccagggccccctgggccaggagctccagctgcccatccacactgctgaagaagctgttcacggtcacggactcggacctgcagcagggcagggtcgaaggcggagtgagcctagatggcctgtgcgcccacacaggagtaggcacaaggaccacgtctgcagggtctggaggaaaacgaggagccacatgcccccagcgccgctctcttctgaggcccttcagacaacacctggctggggtggggagcccgccaggcggcagcattggcagtccactgtgagagcacgggtgaggggtggaggcgggaaggcaaacccaacaggctagcggcctgtgtggtaaggcaggggcacgggggcctggggtccctcccaacacaagctgcagcagtggcctcagcctcagtgccctcacttgtcaaagcagacaagaagattcctccctcggccccgtactgtccactgtgcagggagcacaggcagccacagagcaaggtgccacgggcggggatttctcttggtggacaccgagacccgcctctgaggggccggagagcccctggggatgggcagcatgcatggtctgtggcccgtatccctcacctcggcctcctgggctccagcagggtcagcagcacctggatcccactgacgatgacagactggctctgctccccctcgaacatgttgcttaagagctgctcaatcgtctcctgcctgcgggggcaggggcaggggtcagggtgaggggccaggggcccagggcttccccaagtcagctccccccagccttagccttgcccgcacacccacttctccagggtggccagcagttggtcaggctctgggctgtcctggacttggatcatctgctcccggctcaggcggatgatgtcacacagggactgggatgcgttggaatgttgctggaacggggagagacaggtgaggatcctggtcgggccaccgggccctctgcagcctggtgctgggagcccctcccatgagctgaccatccagggaaaaatggtcacccagacacagggacacgtgttacgaaggaggagggcacagaggcaccaactgctggagggaagatggtggagagaacaggaagcccggaaggctccccaggacaggaggcatccacacaaggccctcatgaccgcatacagggctggcagcaccgcccacaatgacccagaaggctctgactgatgagtgaatatgcccaagctggtctatccacacaggagagtgctaatcagccaggaaaaggagtgaaactgatacatgcaaccacatgaatgagccacaaaaacatcatgctagagaaagaaaccacacacagatcacgtagtacatgattccaattatatgaaatgtccaaagacaaatccacagagacagaatagtctggtggttgccgggggctaagaagagaaaggggaagatcaggaggagctgctaatgaacacagggcatcttttttattttttctggagaaagggtctcggctgggtgtgat[145 bp omitted]aaccccatctctactaaaaataaaaaaattagccaggcgcagtggtaggcgcctgtagtcccagctactcgggaggctgaggcaggagaatcgcttgaacctgggaggtggaggctgcagtgagccgagatcgtgccactgcactctagacagagcgagactccatctcaaaaaaaaaaaaaaaaaaagaaaggccaaggtggcaggatcacttgagcccaggagtttgagaccagtcggggcaacatagcaaaactctatctctacaaatacaaaaaaattagccaagaatggtggtgtgcatctctagttccagctgttcatgaggcagaggcaggaggattgcttgagcccaggggggtcaaggctacagtgaggcaagatcacgccactgcactccagcctgggcaacagagcaagacactgtctcaaaaaaaagacacggcctctacatcaccccaggcttgagcgcagtggtgccatcacagctcactgcagccctgaactcctgggcccaagagatcctcccgtctcagactcttgagtagctaggattacaggtgtgcaccaccaatgccagctaatttttcaattttttgtagcgacaacgtcttgctatgttgcccaggctagtctcaaactcctgggctcaagcaatcctccagcctcacctgccaaagcgctgggattacaggcaggacttgttttttggagtgataaaaaataatctaaattcaacaagatgataaacgctttgaataccctaaaagcgctgaatcgtaagcttcggtgggtgagtggtatgctgtgcaatttacatctcagtaaagctgctacaaaagagagaaaagagagaagcataagcagagctgagtctacccaacgggcagctgccagggcttggcagtgtggccctgggccatgcctcagggtcctcacagggacaggccccagcctgggtgagcccagagccatctctgctctgtaagcctgtgcgcctctgaggcagaagttggcattgggaaggacatgttgctcccagtggcctcggatatctgaggctcttgacaaacacccactctacactaggccctgtgctgggcaccaggacagagatggagacccaagctggagaaacacatggacatggggtcccccagagctaaaggggaggatgtgagggcgcttgaaagcaaggctgctggacggacacttagaaggacagcaaggggttcaatcaggcaggagacagggaaaaagctgccaggcccagcaatagcacaggccagggtgggcagggacggatgtggggccagcgcttggacaggcgatgaggagggcccctccctgcaaggcattatgtgccaagttcctgggtcatgaaaaaaacctttccagcactttcggaggccacagtgggagaatcacttgagtcaagtttctttccttttctcaaagggcatggatacacctggttctcaatgctctcttttctcaccaatttcttttctttctttttttttttttgagacagggtctcactgtgtcacccaggctggagtgcagtggtgtgatcatgactcactatagccttgacctcccggctcaagcaatcctcctacctgagcttcccaagtagctgggactacaggtgtgcaacaccacactcagctaagtttttacgtagagacggggtgttactatgttgcccaagctggtctcaaactcatgggctcaagtaatcctcccacctcgccctcccaaagtgctggaattacaggcgtgagccactgcgtccagccccaattcctcttttaaaagtggggaagtgggcatggggaaggaactctaaggggaatccgcaggggcatcggcagcactcacattctcatccttcgacgggtggatctgctcaatcagccgctggacgatcttctcctcgttgagccactgagggtgagaaggcgagggatgcatcgctgtccaccacgcccagccccccacccccagaggagccggccctgctcacattgacaacatcctgcctcagctgaggccgctccacacaggtgagcaggcgcagcaggaggtccatgatggccgaggtgccaatgtgctgcagcagcaggtccacgaagtcatccttcttccgaagaaaggacacgagctgggggcacacgggctgcgtcatgcacagggcctggcccagccaccacccctcaacccacggtggcgccagggtgggggccagggcacctggtctgtcttgcggttgatgaggatgcccatgaccttgctgaagaagctggccagcagtgggttgaggctgccggtgctctgcaggaagccgtagagccggttcagaagggactcatcagcacccagggcatcattgatctggggcacatctgaggtcagaatctcgcaggccacactggggtacctgggaggcaagcacaggcgggtgggggctcgggtcggaggccgggggcagggggcggcaaggctccaccctcttctctgcaccgggcactgggtttctgggaactgcagagacccctgtccaggaaggggaaagggcagaggacagggtgacgcagaaacaagggcccacaccaggcctcctccaccctgctaacacccaaccatcccatcctaggctccttaccacccccaagacaagctggtcctgaagctcctgcgcttcccaatcccccagcagctaacactcatcccttttgcctctcagcggcttcacttgcaaccccgtatgctgccccagctccggctgactcctggaaccttgctcaacttccaacctcacctcctgcctccctcctccaaactttcacacggtgcctgacggctccaagacaagagctgccccaccagcgtgccactcaaggccctgaggggccacagtctgctccaggactgtggggaggtaccccttgggaggctgaggcaggcatatcacttgaggtcagaagttcaagaccagcctgggcaacatggcgaaaccctgtctctaccaaaaatacaaaaattagctgggcgtgctggcttatagtcccagctacttaggagggtgaggcaggagaatcacttgaacttgggaggaggaggttgcagtgagccgatcatgcctctgcactccaacctggtgataaagtgagtctcaaaaaaaaaaaaaaaagtgtcttttcagcatcgcttggattaaaaaataagtaaagtgtcttcaatagcagacaagtgtttcacaaacatacaaaaaaagtttaataaaaagtaaataaaataaaaggcggcgaataaagagaaaaaccagccgggcatgtcgtcacatgcctgtggtcccagctactcgggcaactgaggcgggaggatcacctgggcccgtgaatttgtggctgccgtgacccgtgactgtgccactgccctccagagcacaggcttggtctgcacccggtgagctgtgaggccttgtgcaggagcctggctgctcccagcctcgtcttcctcatccccaaactggagtttactgacactgacgcatttcagggtagctgtgaggcttgcgtagtgaaggtatgtgtgatgctgatagggacgggctggccaggagctggggaactcacttgtagcgcagccgctcctcaccgctatctggcggctcctgggtgacccaggccaccattgcttgcaggtggggtggctgcagcaggaagtccagcagcttgcggttgacgaccttgcactcctgcagcacgtcttcctcgtccagcagctcgggcaggctcaggtcctcccgctccagcagcgtgtccaggtgcgagcttgtgtgcaggtcaaacttccaaaacatggcgccctgcaggcatagacacaaccagcgccgcgtcagacgccccagggagtccccactggacgaggcactgaccacaggggctgagtgcccaccttgggcacagcctctccccaagtcccagccctctgcctcatgctgagcccggccccgccccgggactgcccgcaggctcactgcctccatcactcaggcttaaggctcccagtgagcaccaggctcctgcagttgccctcgagcctgcccctcttcccccatctccagcctcccggccgcctcgcctgaggtccagggggtcatttcacacctgaggcctcaggcctggtgaagtccccaggtgtggaccatgtgcagggcctgcgagaagaggctggaccctgtgcactgaggggcctcgggccctgtctccccatgagggtctgggtccactatccctacttttgggagagacactgcagaggcagggccttaacctctggcttcaaatttgcttcaacctgtatttgctcaacaaactcagatgcccgatgacttccagcacacggctgctgcttggcccagcaaatcccccaaggctacgtgggaggcatggggcggcggcagggggaagagaggaagtctgtgcatctccaggctgtggccgttgcctggacaccactcacacacaaacacaccccaaccatcctctcacccagcacctgggctggaacaaggaagaggaaaagttggaagggaggggctcccagaatagtcactgaccaggacctgaaggaacccagggtgggatagacagattctgtgggggaagaacaaagctggcaacacccggccctgaccctgtccccatctggagctggctcccgccctctggaggacagtgcctggttcctcagcctggttccagcccctaaacgctcgtgcatgggaactcactggcaataaggaaacacacacagagtattaacaagatgccaggcaactccattctgagcccctgccctgtactacatcactgctccgcagagccctagaaagcctccacacagaccttccactacagacctgacctgtgacctgtgctctgggcacttgatgacaatggtcctggctctgcatgtgtgctgtgcacatgatgtccaagctcaccagcagcccccaagaaagctgtcatcactccgccacacaggacaaggggcaaccaaagcccggtaagtcaggcggcatcctggaatctcgaaggccatctggtcccagcagacagccttcacggagctctcaccagttaagacactgaccagagctcacgctcattacctgcctcctgacaaccgcatcaccagctaaggcagaggccactgctacccccaagtcactacagaggatgctgagaacagagcagagccggcacaagaggccaagggtgcctctcccgcaggccctcaccaccatcactcccaggcacagatgctagtccctctcctccaatgcccttctgcagcttcttccagttcagtcattccctctgcacaggcctccaccatctcctcgagccctgctgacctgtcacctcagtgcccaccagcccccaggcctgactcagccccaggccccagggaagagacagggagacgtggagcaccaggcccagggaagagacttcatcggagcttaggagagcagcctgggctgacaaaacgcaggacagagtcccacacatggcctcaggcaggtcgaacgcctcttgggcctcctttcctctccttcctggctagcttgaagccaggccagcctggggccaggatctccttgctcatccaccctgaccaccctaaggctgggctcagcacagaaggttgcagtccagaccttgctcccagtctgcccgtctgcctcggtaactctagattggcaacaatcttgatataacactatatgggtccctacacctggccaatgacagttgagggtggagcagagggaagagttccgtgaccaacgacagtcatggcggcagcaggaggactaggggagatagcagcagcctccaggcatttgaacccctgctcctctggggggcctgccaggtcccagtccacagcacccagtgactcaccacttacccctcaccagtccacttttcccaataatcctttgtttttgaggagtctcactctgttgcccaggctggaatgcagtggcacaatctaggttcacctcaaccttcacctcccgggttcaggcgattcttccgcctcaacctccctagtagctggtactacaagcatctgccaccacacccggctaatttttctattttggtagagatgggatttcaccacgttagccaggctggccttgaactcctaacctcaggtgatccgcccacctgggcctctcaaagtgttgggattacaggcatgagccaccatgcccagactcccaatattccttctaaggttgggtgtggtggctcacgcctataatcccagcactttgggaggcccaggcaggcagatcacccggggtcaggagtttgacaccagtctggccaacatgatgaaaccccgtgtctactaaaaatacaaaaattagccgggcatggtggtgtgtgcctatagtcccagctactcgggaggctgaggcaggagaactgcctgaacccgggagcggaggttgcagtgagtcgagattgcgccactgcactccagcctgggtggcagagcaacactctgtctcggaaaaaaaaaaaaatccttttaaagcacaaacatgagtacccgcacctgctcggtgatgtgcactccaccaagcctgcatccaggctctcgtgcccctgcccagccagctcactgactgacctccatgcccacggtgaccccagtgccctggggaggccgtgccccatgccacctcgccagtgctcctggggctgccacttcaggtgtctcctgcacagcccgtggctgcctgaggcacagtgctggatggatatccaggaggccctgcgggtctgggtggatgggggcattccaggcaatgatgtcgatggtatcagccactgcgctccagcacctgcactgcgctgactactctgaaaaggacttcacagccatcacctccaccaactctcacaaccaccctccagggaatggccttattttacaggagaggaaactgaggcacaccaaagtaaatgcctatgccccgatccaggggttggcgggcagtgaagctggcactctcagctttcagaagttgtattttcagggtgcagagcccttgtcccagcacagggcctgtgtagtggacacttaagggatgaatgagcgagttcccgctgagccggctccagcacttgctctgcctgagggactagccctggccacagtgaccccgactctcacctcagggaggagcctgccatttccaggcccaccctgaagggacctgtctggatggtaaactccctgtccaccttgtccccagctgctagtgcttactcaacagacatccctggattcaggatggagggctgtggtcctcaggaccctcccagcccagctgtgacagcacagttcggccagaggcctgagttctcctccaacccagcaccaccagaaatctagggacttatcaggcctcccaccccgacccaggcaccgctgacctccccaaacataaccatcccaccccttctgcctgcatgaccaccacttgacggcaggccccccacactcgaccgcaggcgacccctgctcgttccctctccccacagccatgcagagcttgctgaagggaaaatcagaaccgccctctcatcgggtcagcgcctgggaccctcaatgacctcccactccctacttgccctggccaagctggccttctgttttcagaacacactaagcttgggtctaccccagcgactttgtcctaataactcactttctcatcctcagatctcttactaagcattcacctcacagaagggccttccctggcctgcctggctcaagcagcccccagccccgcctttgtccaccactgtctccctgtctccctgagctgtgcgttctgacctgccgcctggaagcatctctgtgacacagcaatgaagcactggaggtacacactcgtggccctacaatgcttcctctagaaccttccccctaggttaccatgggcacctgagggcagcacctagcatggaacctggccctggcaataaacgctcacaagtattagctgaaaagcaaacctcattttcacaaggccccagctcctcccaggcaggaggctgccgtacctgtcagggcgttagacgaagtgaaatcactcccactccggcccctcccagccactcctacggggtccctaaatcaggaggtgggggaaagtgcaagatcgccctgggcaggcaatgggtgtgtattttcccctgtgtcaagagtgacgaaggcaccaccacctcacaaggaaatacaactgtttcccttccttgctccgggaacctctgtgtgcacagtggtaactccccacctccccacttctgcccagatgctagacctcctcaagggaccatcccctacttcccagcccgcttgacaaggaatgcgacaggccgaccaccaagtgtccatgtcacagatgagaaaactcaggctcagcaaaggtgactcaccagcgtgctgagggaagcgggagggggaatggatttcctgatctgggtgtacctgggaccagaataatctcaaggggcaaccgccaaatttatcatgactctgccaatttccggcctaaggctgtggcgagcaaagcaccgagacgtggcaagcacacacacacagcctctttctccgtgggagaccaagcaggctgataggctgcccatgccatgccagcaaagccagtcccaaggaaccacacactgcaggcctccaactatgtgaagcatccagaacaggcaaatccatagagacagaaaagagcttacaggcttccaggagctggcggggattgggcgaagttcctgaaaggaaagggtgattaaaaaaaagttccaaaatcaattgtggtgatgtttccacaacgttgtgaatacactaagaaccactgaattgtaccctttatttattattttttttcttgagacagagtctctctctgtcacccagcctggagtgcagtggcgcgatctcggctcaccgcaacctccagctcctgggttcaagcatatctcctgcctcagcctcccgagtagtggggactacaggtgcgcaccaccattcttggctgattttttttttttttttttttgagacagagtttcgctctgtcacccaggctggagtgcagcggcgcgatctcggctcactgcaatctccgcctcccggttttaagcaattctcccacctcagcctgagtacctgggattacaggagtgcgccaccacacccagctaatttttgtgtgtgtttttttagtaaagacggggtttcaccatattggccaggctggtctcgaactactgaccttgtgatccgcctgcctgggcctcccaaagcactgggattacaggcatgaatcaccacgcccggcctaatttttgcatttttttagtacagacggggtttcaccacgttggccaggctggtcttgaatgcctgacctcaagtgatctgcctgcctcggcctcccaaagtgctgggcttacaggcgtgagccactgcgcctggctgtacactctaaatggatgaactgtacagaatatctcaataaaaactgttgggggaaaaaaaaaaacctgcctcaggccatcggccatggcagggacagagccagggccaggctcaggccttgcactatgtcccagcgtccgcagagctgatgagatgccggccagcctggcagagctgaagctgccaaggctcagccctggggcactcacccaggttaccccttccccatccctcaccaccaacagctctaagctaagtgagcccctccacagtggggacgggataggagcagcaccaagccagcatctgtagaaaatccatggacccgcacttgcagagacacttgtctcggctccacatcaagaccaagtaaagaattcttattattccgacagagtctcatgtggaagaggggcccagaggggtggagccacatggctagcaagaggcttccagtgtgccctggtctctaaacaacaggcagaaattctcacactgaggcccaccgttcacttctaagatacctgattaaagggcacaggcatggccctcggcccccaaaccccctacccctggtacagactaaccatctgcttcggggaaaaggtcaggcttcccctccaaaccgagctccccagacaactggggcaggggcagccagaatgagacgggagggtgctcgctggtgcacggcatccaagaacttcggccctgagaacccaggcagcgccctgaactctccatctcaagtggctcctctgaaaatcagaatagactgaaaggctcaaatgcaattgagtggtcgacactctacagacctcaattatcaggctctaaacagaatgaagatgcaaatatggaagaacagaaaaaaagagaaaaaaactttcccccaccacaacctctgaatgcactatggcctgaagccctctcagtcccctctcccaacctaatgaagcctgctagaatccctgcgaatggagcaggagagtgggtttcactcgcactctcctggtgaacctgggcaggcgcttgatttctctgagtctcatttcctcatccgtgaaaaggagacacagcccaccagggcgggctgctgtgaaaaggcattgagctaaagcaggtggccgtgacacagcaggagctcagcaggtgcaagtctcttccggtccaaccctgaggccacgtccagatgctttctggcaggacaggtaggggaccggtcactaccccaaaggtgatggtgctaaacacagaggagcaggagaaagactctacccatttgcctaagtgactcaagtacttttcctcagaccattcggatactacggcaggcgccatgcaccccgccacccccattctttgcaacttttagcaacttcaagaaagcggaagtgactaccactagtttttagctaccgtttgaaaaccatgagtctggctgcaaacggaagaaggggaaattgtaaatgagaaaggaagccattaaaaacgaaaactacctctgccgctctccctccaccagctctgcactattgcctctggtttctgacttagctgtggtgttttagggccttcaacaccagccacccctcaagggcctgccagccccttccttcccctgcttggacaggcactaactgcggctcccacagagccatccccactgctgcacgtatccgcccaagcacagctctgccgccagggaaccggtgggcccatgcttcatctgtcaccccttcccaacctgcgctgacccacgagcacccagaaatggaggtcatgggcacagatgcctcagggggcctccagaaacagctgcctgagctgtcccaatgctcagcagaagctccaacgcctggccccctggccggtaccctaggaagggaaagagcctgctaccagcagcaggctggccagcacccagctccttaaagggcccagagtccggaggacagcaagaccatctccctctaatgtcccccaagcctctgtcagctctcagccaaatctgaaagggggctgggaacacccaattccagggatgcagtgacagtaatggcaaccccaccacctctgggcaggacctacggtgtgtgccggctgcagaatccggcatcacccacccagcaaggaggaaccagggacaccaatttgatagaaagggccactggggccagaggagaagggggagcggcccaaggcccaacaagatgatgagctagggctttcctgtggcttgggaaagccttggggagggtccccacttaaagagaaccctcagtgcctccccctctggccccagaagcacaccctcccaagggagctagcagccctggtccaaccccagaggatggaataactaggaaacagaagagtctagaaacactggccaaggactgggacggggacttgaacatccacattcaaatcgtctcctgaactggccacaggtttaaaggaaagaaaggaaaagaccaatgaacggatttgaaatagctctttggaaaaacagaaaggggcagagttagggttacagtgtgatccaaagtcagaaaagcttgcattcccatttgacctccccaaactgaaatctctgtggcctagaccaaggatctcaccccaccgagccccagtttccttatccgggaaatacctcacagatggggttactataaggcagcactctctggagaaggacccacaaaactggtgtgcaaagggaaaaccacggtttggcatggaaaggcaggtgagccccatcaagccgggtgccgagtgattcccactctggcaaggcccctcactctcaccaaagctctcaggcctctctcacctcatctcttgctacctcccgcgtgggcgtcacacctgactgccctcagccggggctgggctgctccctcctccttcccggagctcttcgagtctgactagctcctcctgggtccttcaggcccccacacagacaccacttcctccagggagcctcccccccgcatctgtgttagaggcctgctccacgccgcttccacagcatcccgcagtcaccctggaacagcatgtgagcctcggctctgtgacaggatgtacctgttcagtcatctgcctccccctgaaacatgccgacttcccaggatctagcataaggccaggcccaactaaagctacttgttgaattaatgaaaactgaagccagagaaaggtgttctgttaagagcactgggccacacatcccacaaaagaaaaaaaatgggcagggggaccagacaagcaggttctcctctaatggaaagaaacagtagatgaaccaacaaaagctaatggccacaaagatggtggtgactcgcaatacacaactcaccaactcacagctcatgagtcacaacagagcaaataagccacaacgacacaccataccccagcagtggagcaaagttctcctcctctgcgctgctaacatttgggctggacggttcttttcggtgttggggctgcccatgcactggaggacacttagcaacatccctagcctccacctccactcaccagatactggcagcattccccccagttgtaacaaccaaaaacatctccagatatcgccaatcgtcccccaggggacacaatcgcccccagttgagagccactgcaatggacattcccaaatcaaataataatcgaaagaacggccaggtgtggtggtccatgcctataatcccagctctctgggaggctaggtaggaggactgcttgaacccacgagtttgaaatcagcctgggcaccacagcagggcaccagagcaagacccagtctttacaaaaaatacaaacattagccaagcgtggtacaaaaacacaaaaattgagcaagcattgcaggacgtgcctgtagtcctagctacttaggaggctaaggtgggaaaatcacttgagtccaggagttcaaggctgggcaaacgagcaaaacccagtctcaaaatcatcaacatcaaaacagctactgattgcagagtgtcatgtgccttgcattctgccacaggcttctacaaaccctgcacttaatccctagatccaccctctgaggagagcagtctgctatccccacttacagacgaggaacaacttgtccaaggtctcgcttggcagaagccggactcggcctaggtctgtctggcaaaagatcctctaacaattagctggactgccttctcatgatcccaatcccagaactagagttaaaaaaaaaaaaaaaaaaaaagcataacattttcaacagcacaagcagctccaacagccatcccaccactagtaagcacacgtggccgggcgccgtgtctccatgtgtgttgtgcatgtatgtaaaccaagtcctcatcctgtgttatccaggcaatctcgagtccttgctgcatttgcagcgcacgctaacagttagaccctcgcccttgggctggatgaaatcccactgcagtttctctacaactgtgaacccagtaccgcacctgacagtctacgcagcttcctttcctgaaacatcttgcctttcaggcgggtgtctatggtcatgtctgtgtgtactacgagcgagcaagaaagaccccaaccagaggtcccattcgaggcctggataagcacgccgggcggaactactctgcccctcaccctcccaatacatctgcactcaggactccgaccttccttccttgacatatctgcacgtgctgctccttccccccccggaaggcccttcttcccactctccatctgtcacctcctactcatccttcctagacagaaaaagccgtccgtccagtcagtctcaccagtgcctcccgctctgtggccccctgcagctccctaagtcacctcgatcacgacacgcaggaattgtgactgtccggctctgcctttgtaccccctccagggaccggccccacctccagggcagggcctagggctgatgccccctcctcggtgcccagcgccaggctccctgcctgccctcagcaggcttcatctcactgaagcaggcccgagtggtggctgctccagagaagccccgctcccaggtccctcgcacaagaagccggaggcgggagagggtcggtcaaggtgaaaacaagccccgctcctccagtcctgagctccggggatctaaggaggctgcgccacggaagaggtggcggggcagagatcggggcgagagggaagggtgtaagcaggcaaagtccagggtaaccagggagaaagactcctggggggccggggaaccggccagagaggcaagagagcggagctgaggctcagggactggggagcgcagctgcagagagcgagtgggaaaaggccgagagcaagagactgagactagggtggcggcggagctgaggtgaagagattaagagactggggagggtcgagggggaagaaacggggtgccgtggagaggaaacccgaaggaaggagggaaaggatccgaagcagaaaagacccgcgggggtcccgagagggaaaagcctgaggggacgcggagaggggaagacgtgggcgcctggccctggagagagagggtcgggcgacgcgggccgctcacctgcgagggggggcggcggctcctcgcactcggggctcatcggggcgcccccccccgccccgccgccggcggctccggcccctgctgcggggcccggtgagtgggggcgggggcggcgtcggggactcgcgcaggcgccggggctcgcggggtccgcgcaggcgcccgcgggtcgtggggtcctcgcgcgccgggtcctgcagagttgagggggtcagcgccgggtggagttgccgacgggcggggggcgtcactagtccgcgtaggcacctccggggtccgcaggcgaggtgggcgtgcgggccgaggcgggttggcgagccgggtcgcgaggcccacgcaggcgcctcagccgggaagacgggggaagttgccccggtttccacagtccaaccgagcgccccacgggaggggaaggcgacctcctccgcggtccaaacgggccgcagagccgagcagcgaccgacggaagccgaggcctacttccttaaccaccccttccccaaagccgctcaatctccgggctctgcggccggcctcagggcctccgacgcccggctccctccgccactatcccacaatccccctagcgcaggacgacgcaggaggccccgccctcccgcggctgtgttggtgcgcaggtgcggggggcggggtgcacgcctgggcggtgcagtgcgcgtgcgcccgggcgctcccgacaccgcccactcttgaaccccgccgccgcagacgcgcttgcgcccgttggtgccaacggtctgccccggaataaacccagacagctcagtgagccgcagctgcgcaccggctccgttccaaggccccgtgaatattccgctccaggatttcccttcccactcgctccgtttggaaatccgttcgctgttctgtctcctctaatcatagtggagctttggctccagggtcgggctcttgcgaaatccagacctggttttcgctccagccaaagccaggcgccttcgttccgtccggctctcgcgcttagccgcctccgagcctcagaggccctcagtcgtttccgtctgctggcgatagtcccggccgggtcgctggtgttgccagttccgcccaaagcagcttctaatagcatcaactgaaagagacctcctagaccttgtgtctagattgatgaaggtccctctggctttgagcctcggtttccccaactttaatagctcccctctctacccatgttagaggcctactgtaaaaatcgtgtgggcgcgaggaacttttttgtttttgtttttgttttaagactccgaattggccgggcgcggtggcttacgcttgtaatcacaacactttaggaggcccgaggccggaggatggcatgagaccaggagttggagaccagcctgggcaacctagggagacccccgtctctacaaaagaaaatttaaaaaattagttgggcctggtggcccgcgcctgtggtctcagctattcgggaggctaaggcaggagaatcgcttgagccgaggctgcagtgagccggattgcaccactgcactccatcctaggagacagagcgagaacctgtctcaaaaacaaagggcccagcgtggtggctcacgcctgcctgtacttgagctcaggagttcaagaccccacgcctataatcccagcactttgggaggccgaggtgggcggattgcctgagctcaggagtttgagaccagcctgggcaacacagtgaaaccacgtgtctactaaaatacaaaaaatagccggacgtggcggtgtgcgcctgtaatcccagctactcaggaggctgaggcaggagaattacttgaacccgggaggtggatgttgcagtgagcccagatcaggccactgcactccagcctgggtgacagagcgagactccgtctcgagaaaaaaaaaaaaaaaaaaaaagagcaaattcacccctcctttgccctctttgttctattgagaccctcaatggattggataatgccagctcacactggggagggaagatctttattcagtctaccgattcaaatgctagtctcttccagaaataccctcatagacacacccataatgttttaccagctatctggacatcccttagcccagtcaacacctgaaatgaaccatcacagagaggcatttccttttctcttttttctatagagatgttttgtcttttacccagcatttggcttccttgttttctccacaatatgatggcatcattgccacactgttttaacacagaggtcaggaactgagggataaggatgtggctatagtccctacccttcaaatggaagctgggaagctgtgggggctttaatgactgaagtctggatttccacccagcagaactcacagatatacattgtgtttgcattagaattgaaacttttttttaagagacagggtctggctctgtcgaccaggctggagtgcatggcacgatcacagatcactgcagcctcgaactcctgggctcaagcaatcctctcgcctcagcctcccgagtagctgggactacaactggaacttttttcttgagacaggatctcagatcctgcagctacctctcaatttatcctggatttaggaagaggagtgataaaaaccaatccaaatagactcaaaaatcccagatccaccagaacaatccacacaaaaggaatgagtctgacatcaaattgtcctag[131 bp omitted]aaacctggtctctactacaaatacaaaaattagccgggcgcggtggcaggcgcctgtaatcccagctacttgggaggctgaggcaggagaatctcttgaactcggagggtggaggctgcagtgagccaagatcgggccactgcactccagcctgggcaacagagtgagactcccgtctcaaaagaaaaaaaaaagaaagaaaaagaaaaagaaagaggaggatcgctctggaattagtccagctgtgaatcctggctgtgaacttggtcaggggtcagcctcctctgagctcagcctcctctctggaaaaacaacagctttcaaagctcttgtctacaaatgacaaaatttcttgtagctaaacagaaaaggaatttattaaaggaattgaggcagcctccgacacccccacctcccgccccaatcccacgtctctgagaaagctacagaatccgcttggcgctttgcagtcaggaatgaagcccacacccagccacaggcctgctcctgagacacagtgcagcctccatcaacggcacctggctcagacactcccgccagaatctctgccagccctgtccagaagccaggtgtggctgctcctgcactagccagaagggaacctgggcaggggcccctccaccgccaactcttggcccgacgaccggcgggctctgattggtagaggagctagaccaccagcgggttctgattggtgtacaaaacagattcccagagagagttctgatttgtggagctaatgtcacatgattaccctacagcaaaggatgctgggaagggaaatggcggctaccctagggaaaatttagatgtctaacctgggaaattcctcaaacctagaattcaggtttgccaggtggccgaaaaaaggacagatgtcccacacactgttgctcaggaaagacagggaagagtaaatgacacaatggctctatagatgataaagagcaacacttttattattcttccagtggctccccaagtcccttaaacccgtgcccctcctcccgtcccccatgcaccctccaaaggagatgacaaaggcggcagtgaaggaggagaaggaggaagagaaacacctttattggaagagctgtgtggacaagagaacggggatgagagtgagagcatgggaggtggggtccaaggagctggtgcctttctcagcgccccttccagggactgcacagagacgggctggcacaccctgggtccaggcacctaggccctgcgatcccttgggagagggccttgtaggtggggagggaggcaagaggcctggggttcccacggagaagggggcaagaagccacctggtttcaccgatccatgctgtcgtccgctgggctggagaaacaggtctgtagcagcttttcacagaactccagctcctcctggattgggcaggggcagggagcaaggggcctgagtgcagaggccggaccctgcctccagcattcttggcacccagaggtgactcctcttctctcctggccaccacccactcccccccaccagaggttaggcttttttaatcactgctcagatccatgattcactgtcttcacactggtgtctgaactacttgaactagaacccggggtcccccagactcgtctcactccattggtctgcctcatatcagcactcttgggctctttctaactcccagatatggaccactgctcaaaactttctgcggatacaaaccccagaaaccatgaaagaaagcactgagaggttaaactacgtaatataaaaaatactcccatggcaaaaaaagaaaaagaaaacgaggttggagaaaaatatttgtgattcatagcacaaatggctaatatacttaactcttaaagagcttaaaaaagtcattcgcaaaaaccatcacccaataaatagataagtgggcaaaggatgagaacgaacagttcacaagaaagagaaaagatgccaaatttcactcatgggagaaatgtaaactggactggagtactacttttcaacaatcagtttgaaaaaaggtcaaatggttcatcgaggccactttgtcctgaccaagatttggggagttgggcaccctcatgactggagtgtcaatggttgaacttctatggagagcagcttggtgatagctaatgaaacggcccttaaccctttaaccttcacctttaacatacctgaccccagccatttcccttctagaaattgttctacagacatatgtaataacatatacaaaaggttattctttcagcagtgtttgtcatagcgagagtgtagaaacaacctgcatatccatgctacaaaaaagagcccatccgcactgtacagctgcaaaatgaaagagccacaggcgagacatgcaatgcccacaaagcaaggggcagaacagccatcacagcacggcaggcttattttgcataacatagagaaaaaggagaattcacatgcacctttgctcgtgtgtacctaatattttaagaaggacacctgagcaactgggtagccagaaggaggggcaggagagagacttttcactgtttaccctcctgcgggtcttgtattttcaaccatgtgactacggaacctattcacaaagcattagtaaaatctgttacaaatctaatttgaatgtttccacgggtgtatacataagtcaaaa[131 bp omitted]ctcagcctcctgggtagctgggattacaagcacctgccactatgcccagctaattttttgtatttttagtagagatggggtt[143 bp omitted]ctacacaggaatgaatctaatagaatataacgtcccaaggaggtgggtgcgtttgctaagctcggctttgctgaagcaccagcattgattcattcacttcaacaaattaatgcattacttaatcagttaactatttgaattttaattagttgtgatttagcatttgttacttatctagttatctaatgagttatttatttgccccttatctaattaaatatctgatgacttgttatttatcacttgttatttacccaaaataattggttattttttgccatttgttatttcttgtcaatttaatgaaatagttaaatcattaagacatttgagtgatattatattcaatttacatttacttaatgtaaaacaactgtattgggtaatttagataataattcaatgattgggcaacactttaagaatctccaagctcctgtctccttgctgtctctcctactctgacacagcacgggacgaatgctaggcatgaaataaacatctgctgaatggaagataagtgaaatgcacgagaacacgaatgaaagcctgaaccagcggacccaggagcccccaagggcaaggactggctggctctgcccctactagggtccccactaccacacttggtctaacctggggaattcctcaccccccaggcccctccccctcacacctggtcctcctcacaccctgtcccttccccaactcacctggtccttctggagccgctgtcccctcccccggcacacgatcctcctcgaaccccatcccctgcccctcacacctagtcctccttgcaccccgtcacctccccgtgtacctggtcctcctggagcccctgtcccctccccctggcacctgatcctcctcgaaccccatcccctccccacacacctagtcctcctggagcccttgtcccctcccccttgcacctggtcctccttgcaccccgtcccctccccatgtacctggtactcctcatgctgctgcagcagctgacagcggtggcggaggagctcctccaggcccagttccggctcccgacactcgcgcacaccctgcggaaagtctgtcaccaggctgtgagggacatgacagcggcccttaggacctccctctagaggcctcactgacccaaccctatcgcccgccccgtcccctggctcactcaggagcctggcaagtcgctgccccacaatgggcctccatttccccatctgcggaatggacctcacgctgcccctggcccagggtgggtgctgaggggctcagcacagggcctggtgcgtgtcaactctggtgtgctgttgagagctccagcatcatctgattagacactaatccactggtgggggcgtgtacagaagcctctctccctcctgcaaggcctctgtgccagccctactggtgaggaaactgaggctccctgactcctgctcctttctggccccacacccttcctctctacgggaaggtcccaactcctgagtccctacgggctgattcctgagccacccccaccttgagaggacggggcccccaccccaggccccgtcctctcaaggagccaaagtacctgcacagggctccaagcacgtgctcgtggaaggggctgtgctctgtccgcaccagggccaccagctgctggaccatccccatggagcacagggtccctggggggagggctgcaggggtcagaggggcagccccacccatctcctatgccctccccgggatgcctgttcctccccttctcccacacctgcacccaccccagggcgtctgctccccactcctgccctcactcaagggctgccacacctttgtgttcagggtggcccaccagcaggttctgcagcaggaatgctgatttgaccttgagcttctgcacctgctgctgcatggccctcatcaacacagagaagccgtccaggcggaggaactgcagcagcccagcctcctgctctcggaccagacctgggagagggggaaaggtcctgagcttgcagtcaccaccaccaccactgtcatcacaagcaccatcaccaacatcatcacaaccaccatcaccaacatcatcatcaccaccatcaccactatcttcaccaccatcacaatcatcatcatcaccattctcatcctcaccaccatcaccatcaccaccatcctcaccaccaccaccatcactatcaccatcaccaccaccaccatcaccaccaccatcatcaccatgacatcaccaacatcaccatcactatcaccatcactatcaccatcaccaccacatcaccatcaccgccatcatcatcactaccattaacaatataattatcgtcaatcatcgtcaccatcatcaccaccaaccactatcatcccttgccatgggcctgcatatgcaagcattatctttttttgaagtatgcttttgagatataattcacaatccacacagttcagccttttaaagatattcacagggttgtataaccatcaccactaactctaggaaattttcatcaccccccaaaggaaacctatgagcagtcattcccaatttcccttccctctggcccctgcaaccacagatatactttcttcctttatggatttacctgtcccagacatttaatataaatgtgtccataaaatacgtgaccttttgtgtctgactgctttcactcagcatgatgttttccaggttcattcatgtcgtaagtggtatcagcacttcattctttttcatggctgaataacattccattgtatggatataccatattttatccattcctccattgatggaagcatcatcttttttaatttttttattttatttatttacttatttatttcattttgagatggactctcgttctgttgcccaggctggagtgtgcagtggagcaatcttggctcactgtaacctccgctcgcaggttcaaactattcttcagcctcagccccccaagtagctgggattatagtaacctgccaccacacccggctaatttttgtatatatagtagagacagggtttcaccatgttggccaggttggtctcaagctcctgacctaaagtgatccacctgcctgggcctcccaaagtgctgggattacaggcatgagccattgcgcccggctgtgtcatctctctcttttttttttttttgagacagagtcttgctctatcatccaggctagagtgcagtggcaccattttggctcactgcaacctctgcttcccaggctcaagctattctcctgcctcagactcccgagtagctgggattacaggtatgcaccactacacccagctaatttttgtattttgagtagagacagggttttgccatgttggccaggctggtattgaactccagacctcataatccacctgcctcagcctcccaaggtgctgggattacaggcgtgagccaccgtccccagtccgcaacatcttttaatcctcacaattatcctggaagtgtgtgctttcagaattctattttacagatgaggaaactgaggcctaaagagccaggctacacagcatgcatgacctttatccagagggcaatgagaactctggaaggactcccagcaggatgagaactgacctttggagtgcacctccagtaaggtgccccctcctgggtaggctctaggcctgtgctggccaagaaggacagaagctgctagtagcttgtggccactaaacacctgatatgtggccagtgcaactaaggaaaagagttgttcatttcatttaagttccattcatttaaacttaaggtgaaaaactgaagcag[212 bp omitted]gaggcaggagaatcatttgaacccgggaggtggaggttgcagtgagccgagattgcgccattacactccagcctgagcaaaaagagcgaaactccatctcacacacacacaaaaagaaaaccaaaaaaagaaaaacacacacaacgttgttgctctggcgcactccacactacccctgaaaactcagcatgttgcgatgtgcttcatttgtaaaatgcacacactaggttttgaagacttagcatgacaaaaaatacagtgtctcattaatagtccatattaattacacattgaaattataatag[148 bp omitted]tcaacctaccgagtagccgagattacaggcatgccccaccatgcctggctaattttttggtatttttagtagagacagggtgtcaccatgttggccaggctggtcttgagctcctggcttcaagtgatccacctgtctcggcctcccaaaatgttgagattataggcatgagtcaccacgcccagccagatgttatttaattaaagaaagaaaaaagaacaggcatgcatggactggaaaacacaaagactcctctcattcaatctgtaagcaaggcctgtcagctctaccttcaaaatgtacccaggagagacctgtcccctttacgccagggtttctccacctgggcacggttggtatctggggccagatcattctgggttgggaggcccgtcctgtgcattgcaggatgttgagcagcatccctggcctctacccagtagatgccaatagtccctctctcccagctgcgacaactaaaaatgtctccagacatttgtctaaatgtcctgtggaggacacgattgtccctgtttgagaaccactgctccctaccacaaccttgatctcttgcctaggttatcaccataaccccccagctcaccgcccaccttccacccaccctcgccgcattcaccctcttctctgtgcagcagttgggggcagggatcacagtatggctgccgtcatttttggaaagaaagccaaagtcatcactgcagcccacacatctcccttaaaaaagttacgcttattcagcgctaaaaagaaatgagctatcaagccaagaaaagacatggaagaaccttaaaagcagattactaagccaaagaagccagtcggaaaaggctgcagattgcatggttccaagcatatgacattctggaaaaggcaaaactatggagacagtaaaaagctcaggggtgggatgactagcgggagcacagaggatttgtagggcagcgagattcctctgtagaatactacagtatggatccatgtcatgatacagttgtccaaacccatagtacatacagcatcaagagtgcgccccagtgtcaactatggactctgggtgacaatgaggtgtccatgtaggttcatcgattgtaataaatgtgccactctggtagactgtaacaaggaaccactttggagtggctccacagagggcgagcgagtccatcccctcctgtcctgggaagggcagtggcaccaccgcctcgggcagcaggagctgaggggacgtaccctgcaaatggctcccagcacggaactccagtaatggtactggacagccacacaatggcataccctgcagccaccaaaaaaaaggacagatgccactgaatggtatactttaacattttcatgtgaattttacccccgagcaaaaaaaagaatggcatccaagctcccagagctcttgccctgcatcgtgcacaactttcgctggggaagccgaccaccacgtggtgaggccgctcacgcagcccgagcttcctgccaactgccagcaaaactctgctagccccggggcgagccatggtggaagcccatctctagcaccccttcctcagagggggattgtgagggatcaatgaggtgcagcgcacagggcttagtgcaatgagaccttcagggaacgaggcccggctgacggctgaccacaacctcatgcaacctcatgcaacctcatgaagacgcaaagccagaagccgccctcctcagcaggggccactgctgcattcctcacccgcaggaaggggaaagataagctactgttgcttaagaaaaaaggacagaggcaggtcaaggtgcgccacagtcaggatggcctgtgccagccgtgcacatctgaggaaacgagattaatccgtgtgtctgtgtgcacacataccacacacgacacactccacataagcacacaccacacaccccgtatacacacaccacatccacacatcccacacacgccatgcacatccacacaccacacatacgcaccacacatacacacctcatatgcaccccacataccccacacatatacatacatccccccagcacacacatcccacacacatacacatgcaacacacacaccacacacacctccacatatataccacacaccacacaacccatgtacacgctacactaacacacgacacgccaaacaccccacatacacaccatacacaccctacacacgcgccacacacccactacacacacacatcacacacacaccacacacacccacatttgttcttacagatttattaaaatctctggaagcagaaacaggtataacagtggttttctctggaatggggaccaggtttggggacagggaccatttgctatgtactcttttgtacctggtgaacgatgtgactgtctcacagatttttaaaaatatgtaatgactttttttttttttagacagggtctcactctgtcacccaggctggagtgcagtggcacgatctcagctgactgcagcctctgcctcccaggctcagatgatcctccctcctcagcctcccaggtaggtgggaccaggtgtgaaccaccaagatgacctaaagacttcttttttaatgcaagctattagaagaaaactctgccagcccctctctaccctgctctggccctcgggacaccatgtccttctctctgccctttgtggccgagctgccccatgtctgtctgtccctgtcaccctagttttggctgtgactttccaagtgcccctttccttgcctcatcagaatgcttccttcttccggaatctcctcctacccaaaccctccctgttctcctcccagcctctgcatggctggggccaccatctgccaggaacacaacactgattccaggactcaggatacatgggggtgagggagagaaagagggtgttggacccccctcacagcccccatttcaatgaccagataggctgctggaattaaaaaatagccaacctcaggccaggcacagtggctcatgcctataatcccagcacttagggaggctgaggtgctcacctgaggtcgggggtttgagaccagactggccaacagggtgaaaccccgtctctctgtactaaaagtacaaaaaaaattagctgggcatggtggcatgtgcctgtaaacccaggtacttgggaggctgaggcaggggaatcccttgaacctgggaggtggaggttgcagtgagccgagattgcgccactgcactccagcctgggccacagagcgagactccgtctcaagaaacaaaaaaagaaaaaaaaaaaagccaacctcgaacagattaaatgtagagttacgatatgacccagcaactccactgctaggtatacacccaagagaacggaaaacaaatgtccataaaaacacctgcgcagctatgtccacaggagcacgagagcccagagatacaaggaaaccagggactgtcagcagacaggcggaggaagaggcagggcacggtggacccacgcaacaggacacattcagccgcgggaaggaacacagcactgccacccgccaccactcggggaccttgcagcatatgaaaggagccaggcagaaaaggcctcacggtgtgggattccgtttgtacaaatgtcccggagagggaaatccttagaggcagtaagtagattcatgttgcaggggctgcgggagaggacggacgccgagtgattgcttaacgggtacagaatttctgcttgggggagaggatgaagatgttctgaaattttggccgggcgcagtggctcacgcctgtaatcccaacactttgggaggctga[133 bp omitted]gaggcagaactgcttgaacctgggaggag[132 bp omitted]ataccaccccgaacgcgtctgatcacatctaaaattagagagtgatgatggctgcacagcactgaatacactaagaagtactacgttgtttttctggtttttgtgtttgttttcagacaggtcttgctctgtcacgcaggctggagatgcaatcatggctcactgcagcctcaacttcccaggctcaggcaatcccaccacttcagtctcctgagtagatggaggtacagtcacgcaccaccacgtccagctaattttttaatttttgtagagacaggggtttccctatgttgcccaggctggtctcaaactcctgggctcgagcaattctcccgcctcggcctcccaaagtgttaggattccagatgtgagccaccacgcctggccaagagtactaagttatacactttaaaaggatgaattgtatggcctatgaattacatctcaataaagctgttagagaaaataaaaggaaagagtccagttggggcgctagtatagcacatgcaggcaggcatccagcacatacgaagagctccaccaggctgggatcctggctctgtgtgtcctctccagaccccctggcccgatccctcccgtgtggaggagacacagtgggcccaacttcagcaggtgtgcataaggattcagcgagtcaacacctggcatggagaaactgccccacagatgttggtttttgtcccgtccctgtgcccgacctggtgcctgtgtcccaggcggcagtatttgggggagtcctggccagctctgccctatggagctgcagaaacctggccgtgtccctctgcccacacctcagtttcttcccctgtcaaatgaggatgcaaacggtccctacttcacaggccattaggataaaaagaatttgtggctggacatggtggatcacacctgtaacctcaacactttcagaggccaaggcgggaggatcccttgaggctaggagttcaagactagcctgggtagcaaagcaagtcttgtctctatataggttaaatgaaaaaaaaaagaagaagaagaattcatgtacagcaggggttctgaccaaggggctttctacatctaggggcatttgtgcgctggcaggtggggtgatagtgtctctccatggcctggaggccacccaccagatgctgctcaatgtcctgtagtgcacaggacggcccccgagagagtgaaccagcgccagtgtgaacagtgcccagctgaaaaactgctgtgtgcaaagcgctcacgctgagggccaggtggtctccccgggaagtggtcacatctgctgcctggctagcagggggtttggccgagtgcgccactcactctgcccgcagcactcagccgtgcaggggtccaacaagcatgggaacaaacgagggaaggagatgcctctccctctgccccagcagatcccgggggcccacccggcacccccccccaccgccagcacccctgtccccagccccacccggacactcacaggagatggcgaagagggccttgacgcgcaccgtgtcgcaggcgtcgcggtccagcagccgcagcagcttacgcagggcacccaggcccagcacctgctcctggatggctgccacgttctgactgcacgtgccgatgagctgtgccgcccgccaccgcagtcccgcagcccccgcctccaggtaccggcccaccagcaggtgcatgccagacagctggcagaagtctgtgccacagaggggagcagagagaggccagatgttagggactgaaccgtgccccccaaaatgcatgggttgatgttctgacccccagtaccttggaatgtgactgtttttggagatgggatctttaaagagatcattaaggtaaaatgaggtccttagggtgggccctaatgcaatctgactggcgtcctgataagaagaagagatgaggacacagacacccacagagggacaacatggagggaggacacaaaaaatgccttctgcaagccaaggagaggggggctcaggagaaaccagccctgcccacaccctgatctcaaacttctagcctccagagccgtgagaaaatacatttctgtttttaaagccagtagtctgtggtgcttggctaaggtggccctaagctgaccactacagctgctgaggccgggagagccaggccggctcccacagggacgcagctctctccaaacacccaaccagaggtccccccaaggctagtacaactcgattccatcagcatttggggcattagggccccaggctccagactactaaatgccaggactgatcctggtctttgtgacaatctgaatgtccccagggtcagcaaaccacagcccacctcctgtttttgtaaataaagtggtattggagagcgtggcagttcctaaaaaaatgaaatacagattccccgtgacccagcaattccgcaccaaggcacagacccaaaagaaccagaagtagggactcagatacttatatactcaagttcatggcagcatcattcataaatgacccaaatgtccttaaaggataaagggataaatataaactgctctagccatacaacggagtattactcagccataaaaaggaatgaagcagctgggcgtggtggctcaagcctataatcccagcactttgggaggccagggtgggcagatcacttgaggccaggagttcgagaccagcccaggtaacatagcaaaacagggtttttgctatgttatatactaaaaatacaaaaatgccaggcctggccaggtgcggtggctcatgactgtaatcccaacactttgggaggccaaggtgggtggatcacgaggtcaggaattcaagaccagcctggccaacatggtgaaacctcatctctactaaaaatacaaaaattagctgggcatggtggtgggcgcctataagcccagctactcagaagggcaaggcaggagaatcgtttgaacccgggaggcacaggttgcagtgagctgagatcgcgccattgcactctagcctgggcaacagggtgagactctgtctcagaaaaaaaaaaaaaaaaaatttgccaggcctgatgacatgcacctgtaatcccagctgtttgggaggctaaggtatgagaatcactgaaacccagcaggtggaagttgcagtgagctgagattgcaccactgcactccagcctgggagactgactcaaaaaaaaaaaaaaaaaaaaaaggaataaagctctgacacacgccacaacatgggcacgccgcctttagcacaatcagccagacacaaaaggtcacgttataatcatctatatgaaatgtccagaacaggcaaattcatacagccaaaacgctgattagtggttgccaggggaccgggggagggccggcctaatgggtgctgggtctcctttgcaggcaatggaaaagttctggaaatagaggtggtgttgcacaacattctgaattgactgtaagtggtataaacagtcatatgggaggatgttcccctcagcccaccttcatcagcactgtgcatcttcattaagacagagaagatacacatatatatttatatttatatacacagagagcgcacgaggccagggaggaagtggtatctttggctttcgttctcatttgattactaataaggtgtaaaattgctgctgctgtgatgattggacactcagcacagtgcttagcacacagcagctgctcaacagatatttcctgaacaagcaaaaaatgaatgaaagagcaaagtcgttaaaagccatcctgcggattggagcaggagttctctgcccggataagacggggagacactggggaaaggtaagctagagggtggcggctgcactgcaggtcttctcggggtgctgcatgcgctcacagaggagggcttcccaaactccgtccagcccctgtccaaaatgaagacacctgactcccaggcctgacacgttacgtttactctgtgcctggtgttgtgcgggcctgggggtttctctcggcccagcctgcgtacaagaggaagtaatcaggacctgcccaaaccagactgccatgtagcagcacagcctgaactatgaaccaaggaagtgacaccccaaatccacaccctcaattgctacaccacccaacccctccaaatggaagtgagctctcctcaaaccttctgtgagctctgctgcttggagtaaaacagcatttacctccccatctgcgaggcccaccccagcgctgtttcctgcgcctggcccctcactcactctactctgcctcaagggcctggctgctgttcctgaacacaccaggcacactctggcctcagggcctttgcactggctgttcctactgtctggaatgcttttcccagagatcatcccacaactctcacctcacttcaggtctctgatcaaacgtcaccccggggaggccttctctgccaccccacccatgccactttccctcttgtactctggggagtggcagtggacacccagaggactaggagagaaacagccatctcagagctgatcagggaagtgggggactccacctgccatgagggtgaggcagagccttgctccttatggcaatggaggcgaacaggctgatggtgagaaggcagcagggaggctgacggtgtgagccccaagagtaggggcaagagctgagaggcagcaggacatgtacagaggggcagaacgtcctggcgggggaagcggggtacctgcggcattgtccatgttctcacacaggtcggccagcagctccagggccccctctcgctcttgctggtcggccgcctgctcggcctccccagcagtggggggcatgggctgtgacagcactcggaggcagctcttcatctgctccacctcctcccgctggcctcggaaggcagccgacatggcctcctgcagccactgacgcctctggagaccaaggcgaggaggaaagaaggagatccatcagtcattcattacaaaggaacagccattaataaagacagccaacaactgag[212 bp omitted]gcagcaaagggaatcgcttgaacctgagagacagaggttgcagtgagccaagatcaggccactgcactccagcctgggcaacacagtgagactatctcaaagaaaaaggagatgagagctaatacgtgactgctggaatttttgggggtgagggaggggagcagaggtctccttagtcacagttctaagtaaatttgagtgagctatttaatgtttctgtgcctgtttcatgcctcactgttgtaaaggttcaatgatatcatatatgtaagtgggttagcataatgctctgtatacagtaattgtcgattaaacattatatataatagctatcgctatgaatctgcaaaacaactctatgaggtatatatcattgttatccccacttcgcagatgagaaagttgagtcacagaaaggttgagacttacccaaggtcacacagtcagcaattggcaaagcctgaaatcaaacccaagcagtctaggctgggcgtgctggctcacatctgtaatctcagcactttgggaggccgaggcaggtggatcacttgacgccaggagttcgagaccagcctggccaatgtagtgaaaccccttctctactaaaaatacgaaaattagccaggcatggtggcccatgcctctaatcccagctactggggacgctgaggcatgagaattgcttgaaccgggaagtcagaggttgcagtgagccaagactgcgcctctgcactccagccgagactgtgtcctccacccccaaccctgcccccaccaaaaaaaaaaaaaaaaaacagcagtctgactacagagcctgtgctcttcatgaaaacacactgctgccttcagaagcactgtctgtatgctgggcactgtgtgcagccctacttaaagtagaacctcagaactaccctatacggtagttattattattatcaatttgtaaatgaagaacttgagattcagaaagatgaagtaatatacccaaggtcacacagctggaaatgctgaatccaggttagtctggctctggagaggatatgtcccctcagactctcttgagatctgaccttcagtcaacgataaccccatctagcacaatttatagcccacaatgcctccacacctggttttctgcctcccacccaagaagaccctagtcttcttgtggctccccaagtcacacttcccaaggcaactctatctgtccccaggcccctcaccccagcttcttgggtccccatcctttacctcctcactcatcggttctggaggagggtctggctcttcagagcccgcggtgatggccatctgcagcaagccttggaggttgcgtgggggccgggaattgcccgagcccccagccgaggagccgccgccgccgccccctgaagagcaaccctgggaggccgggggcagcgccaggggcaggcggctcccccttgagccttcgtctgacatgggccgtttgtgaagaagggaagaatgtgttagagggagaaggtggtcaccgctgaagcagctctggcgtcctgatgggtcgattcttgagggtctgctgagaaggcggcgtttcaggggagctcggcgaccccccatgaccccaaaccactctgcccccagcccacttaaccacagccccttttccttccttcatacccacaggacccttccccaaagtcataagcctctcctttctccctagcaacaggccccacccactctccctggcaacaaccccccttccccatctccactgcgtgcgtcccgtctcttagcaacctcactgctccgcctccgtagcaacaagcccgccctttggtctccttagcaacaagtcttctccctcctctccgaagaggggcgccggaataaggcggatctcacctccccgggtcctcaagccgccgctgctcctacagacaaagtcgtccgcacctgactctgctgggcgccgccatcttaaccggaaatacgcacggtttcacccggaagtgccaggcgtacccacccaacttcgtgccgtggttgcggctgaagctgcttgcccgactcttatccccttctcacctggcgggatactgcactcggccccgcccctcccatccgggccccgcctccaagctgggacgccccttcgtgcgggcgccgccccttcacgctcaagtagctggtcaaagccctgcccctggcccagttttcgcacctcagcgagtcccgcccccgatacttttgcaagctccacccctcttctaacgtgtgccccgcccccaggtctgaccccgcccaccctacgattcccgcccctgctctaggcctttcagactctcccagttgggccccggcccctttacaggcccctcccactcattgctgtcagtcatccttagaaggtttgggacctcgccccaactaatctgactttcgcctccaccggggccaccaaccccatctacaggagccctggggtcgcaaccgtaatggctggcctgtgagccttatgccccccgcaacccctctctcggcctcagtttctccatctgtcaagtggagctgcggcgtggatccctctcatcacccagcctctccctcatggactcttccccatgtcctgccaggtggagaggagaggattcttgaggcctagagccggaaagcaaagtgccccagagcccagcaagattcagagcgccagaggagccagcttggtggggaggcccgaggcctctgtgctccagaagtggggtttaggcctgggcacgtgctggtgcgggccgatctgcagaggtgttggccctgggctgggcttaaagaaactcccgtgttgatcctggataggaggcgttttcctccaggaaaaggttgtgctcaacgcaaaacgggcacacagtcacaaacgtatcaatcacctgctgggcgtggttgtgcagggggatattttgggcagaaacaggaagaccaaacagataggttgtgtgtgtatgtgtgtgtgtgtgtgtgtgtgtgtgtgtgtgtggtgtttctagcactgtgctgtgagatgcatctgggcctgtggatgtgctattatattagtttcctattgctgctgttaacaaattactaagaatgtggtggcttaaaacagcacacatttattatcttgcagttatggagggcagaaatccaaaatgggtttcacggggctgaaatcaaactgtcagcaggattgcatcacttctggaggctctcggggagaatgtttttcttgccttttccagcttctagaggccacactctttctttgacaggtggccccatcaccccaagttctgcttccaccttcccatctccatcactgactgctcctcctgcctccttctcacaaatactcttgtgattccatcgagctcacccaaataactgggataatctccctatctcagtcacatgggcaaagtcccttcagccatgcaaggtaacttatgcacagatcctgggaattaggacacggacatctatgtacaagtctatcagtttataatacatggccgggggcagtggctcaggtctataatctcagtactttgggaggccaaggtgggaggatcacttgaacccaagagctcgagaccagcctgggcaacatagtgtgtccccagccctacaaaaaaatacaagaattagccatgtgtgatggcatctgcttatatcacagctaggcaggaggctgaggcaggaggatcacttgagcccaggaggtcgaggctgcagggaactatgactgccctactgcaccccagcctaggcaacagggggaagaccctgtctcaaaaaacaaaacaaaacaaaaaaaagagggtgatcatataatttttcatctatagcaagacatttgagagcaaaaagggactcaatagttacagaaccaggccaggtgtggtagctcacgcctgtaatcccagcactttgggaagctgaggtgggcaaatcacaaggtcaggagtttgagaccagcctgaccaacatggtgaaaccccatctctactaaaaatacaaaaattagccaggcatggtggcgggtgcctataatcccagctactcgggaggctgaggcaggagaatcgcttgaacccaggatgtggaggttgtagtgagctgagattgtgccactgcactccagcctgggagacagagcaagattccgtctcaaaaaaaaaaaaaaaaaaaaaaaaaaaaaaaaaaaaaggctacagaaccagcctggctaacagggtgaaactccatctctactaaaaatacaaaaaaagccggacgcctaaaattgtaccctgctcaacaggcccctcttaacccccttccctgctgtagtcacctcctcagcacggacatgattatctaacacaccatacattttgcctattgaccttgctgatcatctgtttcatccaccagcatggaagctccacaggacaggcctttttgctgatttaggtcactgccacgttcttaccaacaggaacagtgcctggctgagatttggcactcattaaagatgtgtggactcaaggtgttgaatgggggactgggaaatctcacaggagccaataggctcctgtgtgcactttattttattttatttttgttagagacagggcctcactctgttgctcaggctggagtgcagtggtgcaaacgtagctcactgcagcctagaactcactgactcaagcctcagcctcccaagtagctgggactacaggcacatgccaccatgcccggctaatttttaaaaaaatttttgtagggatggggtctcactgtgttgcccaggctgatcttcccacctctgtctcccaaagtattgggattacaggcatgagccaccttgcccagccctgggtgtgctttacaggggacttgagaattaaatgggtgtctaacacttgcgggtacatgacatagagggatctatggtttatgcggaaagctaatgggggcaggcgggttactcacaggcagagcacatgcttgtggacctgctacagtggggatgtatgggctgtactggggtccacatgaagatataaaggaccctatgacgagcacagagaatatatgggggtctaaaaacataacacagggaaactgagggggttctggaagcttctctgtaaagagaatccaaaatcactctgggctgtgggtagatatggggccttgacattggtggggacacagacttacccttaccctgaatgggtggccttagggggctggggaaacagacatgaattttgggtcagcaactccaagaattctttcccctctctgtctctgtctccctccatatgtccccacctctccccagcacgtgtccctccacctgtgtgtacccccggccctctctacagctccatctgcgccccctctcccccacctctctggttggtcttcctctctctgtctctctgaatctctgactctctccatccctctgtcggcttccagcagctttctctccctctccctgtctgttttcccggcttgccattccttccttctcttctgtccctgtccatctctgcccttcctccctctctgcctcagcctgtctctggtggtctccatccctctggcgtctctgcctgtctcccgtctctgtgtcagccagcatctctctttgtgtatctccatctctgccccatctgttgggtcctctctctctctctccatccttccctccatcctctctcctgcatcctcccacctcctctccatccctccagctggaggcccgccccctgccccccctcgctccccctcccccctccgaaagggttaactttggggaagggcccggagtccccggatggtgatgtcagcgtgccggagagaaaggacgaggtggcggggggaggcggagaggaggaggaggcggaggagagagggcgcgtgggggggcgggggggacctcggcctgcagcatccgccggcccgcacctcagacccccccggcggggggaggcgcaggaagcggggggccggccagaaacgggctggggagggggggccccgcagcccccctgggccatgctgactcccggggcctgacccccccgggccagccccccctcccccagctccgcggcccgccgactggggggggccagcccagccccctggggacccccggagaggtggggggcagccgggggggccgggacggagcggtcgccggcccccaccggagagacggggcgacggccgcagggggggcggccgggggaccggtcgggccgggaccaagggcaccatgtcgtccggggccaaggagggaggtgggggctctcccgcctaccacctcccccacccccacccccacccaccccagcacgcccaatatgtgggcccctatcggctggagaagacgctgggcaaaggacagacaggtgagcctagcagaaggggacacctggggcggggggcagggtggaggtggcggcagaggcgggactcagggtattcaaatggcaggggctggctgcccagacccctgggcccctcatagagaagggacttgggattcagactcctgggtccctggatggagggggtggggggcgcagactcaggtcctggaggagaggggctgggggcctggactcctgggtctgagggaggaggggctgggcactggactcctaggtctgagggaggagggcctgggggcctggactcctgggtttcagggaggagggcctgggggtctggactcctgggtttcagggaggaggggctgtgcttggactccggagtctgagggaggagaggctggtggcctgcactcctgggtctgaaggagaagggcttgggggcctggactccagggtctgagggaggaggggctgggggtctggacttctgggtctgagggaggaggggactggggtcctggacttttgggtttgagggaggagggactgcggtcctggactttcaggtctgagggaggagggcctgggggcctggactcctgagtatgaaggaagagggtctggggtctggactcctgggtctgagggaggaggggcaggggtgctgaactcctgggtctgaaggaggaggggctgggggcctggactcctgagtctgagggaggagggcggtcggaaccttgagtgttgggacagggagtttggggccccagtgctccagtccccataggggcagaggctggaggggctccagggccagggaggggatggaggcggcctgcagagtggggccgggctgggacctgaggttcttgctgcagtacagctgcagaccggggtgcagtgcatccatcctgggaaacctcttccctccccactgtcctctggcctccagttctccaggcagcaggttggggtgacaggggccgtggggcctaagacattctccccttctctggcatgctggctcagagtgggaaacaggatggagggtgggaaggtgggctgcagcaggcgcgtctcctggagcggctgtggaaagggcgttcatcctctgctgttgctgaacgctggccaccggccgcggcctccttcctgccggatggatggtgggtggaggtgacatgggagctgaacgcccagagtctctatgaagctcagggccagagctggcaggagtggggaccgactgggccgtaactgggagctgagaccctagggaaaaggagagggtcaaagtcccagatcctgagtggtaagagtgtgaaggtgttgctgacctgaattcctgagttacaggagaagaaggggtcagacctggactgggtctgagggaggaggggctgggcctggagtgctgggtctgagggaggaggaactgggggtctggagtgctgagtctaagggaggaggggctgggggtctggagtgctgggtctgagggaggaggggctgggggcctggagtgctgggtctgagggaggaggggctgggggcctggagtgctgggtctgagggaggaaggggctgggggggctggattcctgggtctgagggaggaggggctggggtctggactcctgggtctgagggaggatggaatgggggcctggactcctgggtctgagggaggaggggctgggggtctggacgcctgggcctgcagctttaggggctagtcagggctaggtctgtggctttgggggctcaggtcctggagtcgagggtcctgaggagaggtgtgggctaggagaccggacatacccttggtgtctgtgtgctgtctgttagggctgccatgaagagaagacccaggaaggcagttgaggctgggggttcaggagaaggtggagggtgatctggggaggggcaaatgtgagattatattcactgggaggggattcaggaggaggtggagggtggtctggggagggggcaaatgtgagactatattcgttgggagtcatagggtctccaaaagattgaaaagcagagaatacaaggaattgatggagagagacagagaaagtgggggggcgggggcttggaggagacagactcggggagacacggtgaggaaagaatgcgtggcaggcgggctccccaggacggagagggtgagggccagggggtggctggcagaggagaggggcacctggctggatggacagtcaggaggaacggactggcaggagggaggggaagggtggttttgtgggagtgtgggctctcagccccaggagttcaggtctgatgtgttcaggccattgttaaacagccagcccaggaggaaggagcaaacagggtggccaaggggggacataggcgctggggacgaaggggacccggcggaacaccccacattttcaccctgctcctgcagggctggttaaactcggggtccactgcatcacgggtcagaaggtcgccatcaagatcgtgaaccgggagaagctgtcggagtcggtgctgatgaaggtgtgtgcgcctgctgcagtgtgcctgcgggtgggggggcctccggggctgagggcaggggcggggccgtgctgacctcttttcccgtgtccccacccctcttgaccctcaggtggagcgggagatcgccatcctgaagctcatcgaacacccacatgtcctcaagctccacgacgtctacgagaacaagaaatatttgtaggtatttatagacacccagccctaccccatcctccctctccaggttaccagggtgggacttctccagaaacagggcctagggggacctgggggacctgcagctctccaggctggaccgctgaaggcccagttccttgcctgttgcacagggaagcccctgacacacagggaaccccactgttgtcacgctgtgttgggcctgaggccaagggcaaccatcctcctaccgtgtccccagctccagctcctcgccctgtggcactgcatggaatgcgctctgctagacaagcagggtgccctcgaccagacccaatctgctatgggcagatgcctcctgtttgtaaggcaaggggcctagcaaagcccaaaggatcttcccaaaccccaactctggagcactggagagcccccctcctcccccggcataacttcgggtgccgtggctggacaccccaacaatgggccgccttaggaggtctgagtcactatctcaaagtcaatcacccgccaggaaggatgggggtgggggtccagctgtccagactccagagaatgggcctctttgtccaaactctggtgacccaaaggacagctgggctgggaagccggagaggggacagccctcgtgttcccccccggcacccagtcccccggatgaactgacatcaggtccgtcgatgctggcgcaggtttcaccacacgggaagctgtctgcccggcgctcatgggacctgctctcaggctttcccaggtgtggtggtagggaggggctattgtccggaccggtgcatggtcgctcccactccactcttggcgtagggaggcagggccatgggagtttatgcttcgggcaggaatcccagccatctaagagctcatagaaattgagcttttggggccaggcgcggtggctcatgcctgtaatctcaacactttgggaggccaagatgggcggatttcttgaagagctcgagaccagcctgagcaacatggcaaaaccccgtctctacaaaaaatacaaaaattagctgagtgtggtggtacacctgtagtcctacctacttgggaggctgaggtgggagaattgcttgaacctgggaggcagaggc[131 bp omitted]ccgtgtcccagaggcttatgggaagggagtttgggggtttttttgttgttttgtttttttgagacagagttttgctcttgttgcccaggctggagtgcaatggctcgatctcggctcaccacaacctccacctcctgggttcaagtgattctcctgcgtc[133 bp omitted]cggcctcccaaagtgctgggattacaggcataagccaccgtgtctggccagaagtgggggtttttaacttctaggcgctgatgggagttgtcgtctattgcctcacagaagctggcttggactggtgcaaccttgcaatcgttaatactcgaaaatgaattcaaatttgagtttcctcactccagagggaattagaggcttggctttctaggggctaataggagtaggggtatcttcacttcccagggtcctataagaattggggtctttgaccttcaggtgctaatagagtcgccttatctcctgaaaccattatgagtcaaagtgttggttcccctctgaagctgacatgggaggctctactgcccagggctaatgggacttgagtttggtttcctagaggctggtggaaactggagtcacttcctcccagggagtgatgggaactggaatctcttcctcccaggaattaatggaaactggagtctcttcctcccagggacccatgggaattggagtctctttctcccaaggatcatgggaattggagttctctgccaccaggagccagtggaagtgggagaccaggccctttggtcctccacatgccccttccagccctctgccccctctatatcctttaggtacctggttctggagcacgtctcggggggtgagctattcgactacctggtaaagaaggggagactgacgcccaaggaggcccgaaagttcttccgccagattgtgtctgcgctggacttctgccacagctactccatctggtgagtgggcagcttgagggggaggaggggctgagggctgcccagcagacaggcccttgggggcatgtggagggctgagcaaaagccatgtggtcggcccccaaacctttatcccattgagacataactcatacaccagaaaattcctccttttagagtgtgtaattcagtggtttttgatatatttgcagtggtatacatctgccactgtggaattttagaacattttctcaccctgtacccattaagtaagcagtcactccccattcccctcctgcccccagcccccggcaacctatgttctgtctgtatggatttacctattctagacgttttatataaatggaatcatacgatacatggccctttttgtattgttttgttttgtttttgagatggagttttgctcttgttgcccagcaggagtgcaatggtgtgatcttggctcactacaacctctgcctcccaggttcaattgattctcctgcctcagcctccggagtagctgggattacaggtgcacaccactacacctggctaattttgtatttttttagtaaagtcggggtttcaccatgttggccaggctggtctcgaactcttgacctcaggtgatctgcccgcctaggcctcctaaagtgctaggattacaggcgtgagccaccactcccggcctctttgcccatctttaattcagttattttttaaaatttgatttagtctttttattattgatttgtaacaattttttattctaggaacaagagattactctaggaacaaaattattcctaaaaattattctgtatgatgacagcaagaacaagggggaaaatttaacaaagaaaaaaagaattgtttattctagatgcaagtctttcatcagtatacatttttaaattattttctccaagtctgtgccatgtttttacatttttataagtcttgtgaaaagcaaaagatttttcattttgataaattccagtttgttgatttttttattttacacctcatgctttttctttttctttttttttttgagacggagtcttgctctgtcacccaggctggagtgcagtggcgcgatctcggctcactgcaagctccgcctcccgggttcacgccattctcctgcctcagcctcccaagtagctgggactacaggcgcccgccaccacgcccggctaattttttgtatttttagtagacacgggg[135 bp omitted]gaaacttttgcccaactcaaggtcactaaggtcttctgtatattttctagaagttgtatagttatagctcttgcatttaggtctggcatccatttcaagttaatttttgtatatggtgtgaagtaagggttgagtaagggttatttatttattcatttatttttagtttagtttagttattgagacagggtcttgctatgttgcccaggcttgtctcaaactcctgggctcaaggcatgagccactgcgcctggcctatgtgtccacttttaaagattttttttttggctgggcatggtagcacatgcctgtaatcccagcactttgggaggccaaggcgggcagatcacctgagctcaggagttcgagaccagcctgggcaacaaagtgagattccccccatctctccaaaaaataaaaataattagctggatgtggtggcgtgtgcccgtggtcccagctacttgggaagctgtggtaggaggattgcttgagcccaggaggttgaggctgcagtgaggcaacagagtgagaccctgtctcaaaaaaaagaaaagttattatttttttcattgaattgactttagcctccaaatcagatattaaatgtgcaacgtttttctaactgttcaggtacaaaatgaatgccttcatcttttagcctccttcatttgcgcatctctctcactaagatgtgtttttggagatggggtggggatcacggtagagggactcagactttgggtaaagcttgatgataaaaaggccacctacttaaattttcggtttttgtctttttttattttttgagacggagtctcgctgtcacccatcctggagtgcaatggcacgatctcagctcactgcaacctccacctcccaggttcgagcgattctcctgtctcaaccttccgagtacctgggactacaggcacccgccaccatgcccggctaattttttgtatttttagtagagatggggtttcaccatgttggccaggctggtctcgaactcctgacctcaggtgatccacccacctcggcctcctgaagtactgggatgacaggcttgagccaccgcacccggccctgtttaaattttccacaccttcctgttgacaagattgtcaaaaccctgatattgaaaccctggcctctagggggagatattcaacgtatttaacaagtttgacccagttaatgaccaggccaaatgaaaactgcagaatcctacactccctctctccccagacaccaacccttaaaccttgaggagtttggttcaagggtgggaaggtcccaagacaggaaccaaggattttaagaaccagctgcatatcagctttacctcaaaatagctcactttgtacatattcaaatacttacagataaactaatatgacatctgggatgtcctacaaactaatttgggttggggaggagtatgtaagggacagagatgagatcagattggccctaagatgatcatggatgaagctgggcgatgggtaagtgaggcttcctcttactttctctccagttttgggcacgtttgtgattgtctattataaaaagtttccaggccgggcgcggtggctcacgcctgtaatcccagcattttgggaggccgaggcaggtggattacctgacgtgaagagttcgagaccagcctggccaacatggtgaaaccctgtctctactgaaaatacaaaaattagctgggcgtggtggcacatgcctataatcccagctactcgggaggctgaggcaggagaattgcttgagcccaggagacggaggttgcagtgagccgtaatcgtgccactgcactgcagcctggtcgacagagtgagactctgtctcaaaaaaaaaaaaaaggaaagtttccaaagccagacatggtgatgcacgcctgtggctccagctactcaagaggctaaggccagaggatcacttgagctggggaggtcaaggctgcagtgagctatgactgtggtactgcactccaggccgggcaacagaaagggaccccatctctaagcatacacttgatcttagccaaaaggccgagaagcaatgcccatctctaaaaataaaaaacaaaataggccgggcgcggtggctcacccctgtaattccagcactttgggaggccaaggcaggcggatcacctgaggtcaggagttcaagaccagcctggccaacatggtgaaactctgtctctactaaaaatacaaaaattaggcctggcgcggtggctcatgcctgtaatcccaggacttcttgaacccgggaggttgtggtgagccgagatcacgccattgcactccagcctaggcaacagagcgagacttcgtctcaaaaaaaataaaaatacaaaaattagctgggtgtggtggcacatgcctgcaatcccagctactcaggaggctgaaacaggagaatcacttgaactcaggatgcggaggttgcagtgagccgagatcatgccactgcactccagcctgggtgatagaatgagactccatctcaataaataaataaataaataaataaataaggctgggtgctgtggttcacacctgtaatcccagcactttgagaggccaa[131 bp omitted]aggcaggagaatcacttggacccaggagacagaggttgcagtgagccgagatcatgccactgcactccagcctgggagacagagcgagattccatctcaaaaataataataataaatacatacatacatatgataaaaaattaaaaatttttaaaaagaccaaaattaatgaatgataataaatggtctctcatcccctaaaaatccaaaaagtatgcagaagtgttccactgtgagagccagtcagtggggcctgggcctcctgggaggaaggaagaggcctgagtcccacctggctgtctcagccacagagacctaaagcccgagaacctgcttttggatgagaaaaacaacatccgcattgcagacttcggcatggcgtccctgcaggtgggggacagcctcctggagaccagctgcgggtgagtggggactgggctcccgagaccctgggcaggggtttagaagctggctggaggctcacatcagctctctccctcaggtccccccattatgcgtgtccagaggtgattaaggtgagtgaggggcggatagaggggagaggggtggaggcagcagtgaggagcgatgaagtcacaactggccttcccttccagggggaaaaatatgatggccgccgggcagacatgtggagctgtggagtcatcctcttcgccctgctcgtggtaaggcgccctcacctctcctgtcatttctagatcaatcccacctggtgggagcataggacagtaccttccatcctcaggtcatctcctgaatttatttatgaattttatttatttattttgagacagagtcttgccccgtcgcctaggctggagtgcagtggtgtgatctcagctcactgcaacctctgcctcccagcttcaagcaattctcctgcctcagcctcccaagtagctgggattgcaggcgcccaccaccacttccagataatttttgaatttttagtagagacagggtttcgccatattggccaggctggtctccaactcctgacctcaggtgatccacctgcctctgcctcccaaagtgctgggattccaggtgtgagccactgaacccggcctatttatttatgtattttgagacagagtcttgctctgttgcccaggctggagtgcagtggtgcagtcttggctcactgcaacctacgccgcccgggttcaagctattctcctgcctcagcttcccgattagctgggactacaggtacctgccaccatgcttggctaatttttgtatctttagtagagacggggtttcaccatgttggccaggttggtttcgaactcctggcctcaagtgatccaccctcctcggcctcccagaatgctgggattacaagtatgagccatcgtgcccggcagct[131 bp omitted]cctcagcctcccgagcagctgggattataggctcttgccaacacgcccagctaatttttgtatttttcacagagacagggtttcgccttgtttccctggtcggtctcaaactcctgggctcaagtgatctgcccacctcagtctcccaaagtgttgggattacatgcgtgaggccaccgaacccagcccatctctcgaatatttcactggtaatgggaaagatactacattaaccaacagaccaagatcctggagttcccccactctgtggggagctaaccttttcattcacagaactgtgggttaaaaagataaaagaactatgggatagtctccaggaagaaccccagaaaggaacaagtcatccaggagcacctggagggcttgatacaatgactgtttaccagctgattctagggcattgtgatactgtaataacaagtataaccaggccgggcacggaggctcacacctgtaatcccagcacttcaggaggccgagcggaggcagatcacctggggccagaagtttgagaccagcctggccaacatggtgaaaccccatctctactagaaatacaaaaactagccgggcttggtggcgcatgcctgtagtcccagctactcaggaggctgaggcaggagaatcgcttgaacccaggaggttgagtttgcaatgagttgagatcgcgtcactgcactccagcctgggcgacagagtgagaccctatctaaaaatatatatatatagccagatcgtaggctatcagccctgctcctaccacagggcctttctgcctgggacactctgctacctattagccttgttgctcacctagttcatatctagacttcttcaagctctctgctcagttgtcacatttccaggaagcttcccctgcccccactcctcctccccactcctgtaaggtcagacccccctgtggtaggctcccttcttcctggcaacgatcagagttgtcgctgtgcattttgttgcctaattcgttgagtggcatctcccttcccttctgtatcatcaactccctgaggtcagggccgatgtctggggcatctgtctttgtgtgttttatttcattttgctggcttgcctttgcaaacctaaagttgacacatgtaagtccccagtgaacacctgtagtgagaataaatcagcagttgtccgggcgcaatgactcacgccagtaatcccagcactttgggaggccaaggtgggaggattgcttgagcccaggagttcaagaccagcctgggcaacatagcaagcaagaccccatctcaaaagaaagttaagaaagtagccaggcattgccgggcgcggtggctcacgcctgtaatcacagcactttgggagg[138 bp omitted]gaggca[137 bp omitted]tgtagtcccagttactcaggaggctgaggtgggaagattgcttgagccctggaggtcaaggctgtagtgagccatgatcatgccaccgaactccagcctggatgacagagtgacacctcgtctcaaaaataaataaataaataagtaataagtagaaaagaaaaagaatacataagtttttttgtttgtgtgtgtttgtttttgagacggattcttgctctgtcacacatgatggagtgtagtggcgccatctcggctcactgcaacctccacctcctggattcaagcgattctcctgcctcagcctcccaagtagcagggactacaggcatgtgccaccacgcctggctaatttttgtatttttagtagacatggggtttcaccattttgtccaggctggtctcgaacttgacctccgcccgcctcttcctcctggagtgctgggattacaggtgtgagccaccacgcccagccataagcagtttttttaatgtcaggcactgttctgatcatgttatttcacacaattccctcagcagtcccagggaggggaagtgactggcccacgggcacgcagctgataagccgcaggcctggggtcagtccttggtctcttaaccaccaggctacataacggatactaagggcaatgaggccagctccaagctggcttcctggggctcaccactccatggggagagcagccgaggtgctctggagacgagctaagaatgttcagaactcagcccttcttcacttggtggctaaaagcctggttctggagcccatccagccgagttccaatccctgctccctctccctgagcgagccagtcaccctacctcagtgtcctcatctgcaccgtggaaatacacatcatacctatcattgtaagggttttgttttcatttttattttatctatttattttttcattttgagacggagtttcgctcttgtcgcccaggctggagtgcaatggtgcgatcttggctcactgaaacctccacctcccaggttcaagattctcctgcctcagcctcccaagtagctgggactacaggcacctgctaccatgcctggctaatttttttgtatttttagtagagatggggtttctccatgttggccaggctggtctcgaactcctgacctcaggtgatccacccgcctcagcttcccagagtgctgggattacaggcgtgagccacttcccccagcccactgtgagggtttaaataaatgctgcacgtgaagcccctggcacaatgcttgatgattattattagtagtttattcttttttttttgtttcttcttttttttttttttttttttttttttgagatgaagtcttagtcttgctctgtagcccaggctggagtgcaatggcttgatcttcttcgcggcaacctccacctcctgggttcaagttatttctggctaatttttgtatttttagtagagatggggtttcaccatgttggccaggctggtcttgaactcctgacctcaagtgatctgcccacctcagccttccaaagtgctgggattacaggcatgagccaccgcacctggcctagtagtttattcttgttccaatagttcctcatcatttgcagattccatatttgcaaatttgcctacctgtcaaaatgtatctgtaacccaaaatagtcctggaggtgctttcacagtcattggcagacatgcccagagcaggggaaacctgagccgcccacccaaggtgcaggtttccggctgaggtcaaacaaagtgaccctgtttcagctctcatcctgtaaacaatccccctttcaccacctatttcgtgtcacgtttttcacatttttgtgttgttggtggcaatttcgttgtttaaaatggccatgaagccaagtgcttctgaagtgccgtctggtgttcctaagcgcgggaggctgtgatgtcccttctggagaaagcccctctgatgggcatgctttgttcaggaatgacttgtagtgctgctggcc[135 bp omitted]gccaatcaggaggctgaggcaggagaatcgcttgaacccgggaggcggaggctgcagtgagccgaggtcatgccactgcactccgggctacagtgctagactccgtctcaataaaaaaagaaaagtgtctttaaacagaaacacatacaaacaaggtcatgtaatgactggttgacaaaaatgtgacgagagggtcaaaggaagcttactaactatagttcctccagtagccgtgactcgttcactagttgagagtttgcagtgactttatagaacagaactctcaagaataacaagaatcaactgtattgttgttataatttgttttggtttttttttttgttttgttttttgttttttttgagatggagactttctctgtcacctaggatggagtgcagtggtgtgatctcggctcactgcagcctccgcctcctgggttcaagtaattctcctgcctcagccacccgagtagctgggattacaggcgcccgccactttgcccggctaaattttgtatttttagtagagatggggtttcaccacgttggccaggctggtgtcaaactactgaactcaagtgatcctcgccccttggcctcccaaagtgctaggattacaggtgtcagccaccatgcccagcctgttgttataatatttaatccagaccgtacccttcctggcaggatcattatgtccgtttcacagaggagaggaaactgaggctctgtgcttgagcatcaggcaaccagaagtcaaacccaggcttccgcaccctaagatcggcattcagaggtgccttctctgtatctccccattctccgtccacaggcctcagataccaggggcaactgggagcttgcaacacccggaaaagccctcaaaggctcacaccatcacctcccatgagtctttgtccatggggggtcaccttggctcccctccaacccttgccctggtgattggaagcattccctcccgtcccgtatgatacgttcgcttgtttgtttcctgtcccctctggaatgcaacttctctgctcattccaccacctttgctgatgacttgagtgtcgagtgtgtgtcaggcagcgtcccaggccaactccaggagggcagggatgtgattttgtcccctgcttcatggctggtggctacgtcagaatgcaggatgtggtggggtctatggtcagtgcgtcacagcagccagcctgtaacagtcctgactgtgggcccagcactgtcatgtactaggtcagttcattctgatgcagtccgtgaggtgggtgctgtgacgacccattgccattttcagagcagtgacttgcctgaggtcatgcaggtataagccccagagcaaggattcaaagcaaggcaggggaccaggtgcggtggctcacacctgtaatcccagcactttgggaggctgaggcgggcagatcacctgaggtcaggacttcaagaccagcctggcca[137 bp omitted]catggtgaaaccccgtctctattaaaaataaaaaaattagccgggcatagtggcatatgcctgtaatcccagctactcgggaggttgaggcaggaggatcgcttgaacctgggagaggcagaggttgcagtcagccaagaacacctcattgcacatcagcctgggcgacaagagcgaaactccatctcaaaaaagaaagaaagaaagaaaagaaaaggtgtcagcagggccctgcttcctctggaggctctagggaaggatccttccttgcctctcctagcttctggtgtccttggcgttccttcagttgcagctgtatcactcccatctctgcctccgtcatcacatgactgttctctgtgcctgcgtcctcgtctcctcttataaggacaccagtcattgatttagggctcagcctcattcaggtctctgctcccattgcacctcctgggagaagcctcactcagtcgctcgtcattgtatagctatttgtttggagctgtgcaagggcagaggcctgttttgttcactgctggatccctgacctgtaacggatgctcaccttttgttgaatgagtgaatgagagacaaccgtttcgaaactgctgtggggggaaagctgtctaaaaggaacagcctccacgctgcaattctagcttcgtaagcggggctccaagctgctccttgccaagtgcctgctgtgccacggacgagctaggggcctttggcaaattgctgagcctctctgtgcctcagtttccaaccccttaaggtggagatcaccgtagttccccacctccagtgcttgtggtgagggtgaaatgtgctaatgaggggtcctggttatctcttgcccagggggctctgccctttgatgacgacaacctccgccagctgctggagaaggtgaaacggggcgtcttccacatgccccacttcattcctccagattgccagagcctcctgaggggaatgatcgaagtggagcccgaaaaaaggctcagtgtgagttgagggggggaccggcggaggggggaacagtggccgatgaagacagaaccccctagaaaagtcatggggatgggtttccagaacctgctcgtcagtccccagggtgactgggatcgccagctgagccgcagcccaaggtccagcacagctgccgctccaaactggggagggggctacgcaagattggggcggggagctccaggcagcgggagggcgcaggagtaaggaggcgaacaggatgccactgcgcatgcggcaaagtaatgcggccggtccggggtacacggagaccgcgcgtgcgcggggcgatgcactcagtcgccactagagggcgatgtaatatgtcatcctgcccccggtggggtgggcggggagatgatcagggaccccaaaaccaccccagtctttcattgcgcgcctacatgtgcctacgacctcacttctgcttctctacgactcaccaccctcacagctggagcaaattcagaaacatccttggtacctgtgagtatggggtaactggactcttgggtccctggcggaaataggggaggggccaaagcagtagaagcggctgggaggggtgggatgccagggttcctgagaggcaacgggctagggactcggacttatgggtcctgggggaagaggacacagctagagaaggagtctaggggtcagaggcaggaggggctaagctaggagtccaggactcccaggtttgagggaaaaagggactgggggcctggactcctggatccgagggaggaggggctgggggcctggacttctgggtctgaagaaggaggggccgggggcctggacccctcggtcggagggaaaaggggctggaggtctggactcctgggtctgagatggggggcgaggtctggggcgtctggattcctgggtatgagagagaaggggccggggcctagactcggatttcggggtccgggatcattgagtctagaatgaagaatgctgaatctcagaagcccggttcccaataatgtttctccacttccccagaggcgggaaacacgagccagacccgtgcctggagccagcccctggccgccgggtagccatgcggagcctgccatccaacggagagctggaccccgacgtcctagagagcatggcatcactgggctgcttcagggaccgcgagaggctgcatcgcgagctgcgcagtgaggagtaagaccccaagacccctgcacccgtgtacccacgtggggcgagctgcagcagctccctgcgcacatgcagagtgctgggcgaggaaccctggcctctcatggggcatggtttgaagctcccgcctgggagtgatggaaccagcggagaaaacggcccagaaacacgctgagaaagtattaatagatgctgcgacatagtacttacatatacatagtacttacaaatagttcttgcctggatgttaggtgttacagtgttattataattgagtgaaacacagctgagatgtaccctaaaccagagaaactgaccatactgatacctagaaaaaatggaaccatgggcagaaatacagggagcggaggagacctcctctgagcattgatgttggacctcagccctctgctacctctttccacctttcccaccccctgccttagggagaaccaagaaaagatgatatattatctgcttttggatcggaaggagcggtatcccagctgtgaggaccaggacctgcctccccggaatgatgttggtgagaaggcagggctaggggaccagacacctgggtctcgagattggaagaggctggccacggggaccccagattcccaaggaaagaaggggctgcaggctctgagcttccagctttagactgcttgacttgctctttgacatttatcaaatcccctctccactctaggcctgtttccccatgtgtgcagtttctgaggcagttgtacacagctgggtgaaaccatctcttgattgggttgaaactgttgtccctcagaccccccccggaagcgtgtggattctcccatgctgagccgtcacgggaagcggcgaccagagcggaagtccatggaagtcctgagcatcaccgatgccgggggtggtggctcccctgtacccacccgacgggccttggagatggcccagcacagccagaggtgggagcccctgtccctccaggaggatccacaatccctgggtctaggagttcaagattctaaccccagctctacctcaaatgtgctgtgtccttgggacaattcacctcccctctctgggcctcatttcctcacctggaaggactgtagaagtgagggaacatctgtggtttttgaaaccctcccatctgattttttttttttaaatctatcctggaaacagatcccgtagcgtcagtggagcctccacgggtctgtcctccagccctctaagcagcccaagggtaaggccaggtccccagtgggatttaagaaggagaaaggggtggagacatggagcaaagattgagtagcagaaactacaattcctgtgcagtcttgagacttgcttctttgtccctggagggccaaagacccaaggcctccaaagtattttggtccattggccatttctacctccttaggattgcatgcctgaagagattttacaaaagttagttgagtgcctgctgtgtactagtatctgcaccggctgggttttcagcccacagcatgatagaaagtctttgctatccttgctctggggcctgggaaggaggatacttggactacaagttgcagcatgcaccgggccagcgtccgtgagtgtgcgtgtgagtggggctcctagagcctcctgggagttgtagtccactcgcttatctcagtctcctgtcctctgcagagtccggtcttttccttttcaccggagccgggggctggagatgaggctcgaggcgggggctccccgacttccaaaacgcagacgctgccttctcggggccccaggggtgggggcgccggggagcagcccccgccccccagtgcccgctccacacccctgcccggccccccaggctccccgcgctcctctggcgggacccccttgcactcgcctctgcacacgccccgggccagtcccaccgggaccccggggacaacaccaccccccagccccggcggtggcgtcgggggagccgcctggaggagtcgtctcaactccatccgcaacagcttcctgggctcccctcgctttcaccggcgcaagatgcagggtatgggggcatgaactgccgagtcctaatgtggggagaggttggggctaaaaatctggttccagggatgtccgtctggcgtgtctagagaggaagggactgggggcctggattcccacgttctagagaagagggggtttgaagcagaggtgcacctgttggggagagaggtggggcctctagctctggaggaggaccccgattgaagggcacgcgcctttggggctctggattacctcccattggcccgtggtttgtgagccccgcccaggagggatggcttggccgaggctgcaacccaaggctctggaaccctgggagggggcgagtgcaggcctgtgtgctggcaactgggatgatgcacaggtgttgaccacgttctctgccttccccctaccagtccctaccgctgaggagatgtccagcttgacgccagagtcctccccggagtgagtctcacagggaaggaaagagtggggatgcaggggattcatgccctcggcgccttcctaaccctcctccaaccaccccctcccactcaggctggcaaaacgctcctggttcgggaacttcatctccttggacaaagaagaacaaatattcctcgtgctaaaggacaaacctctcagcagcatcaaagcagacatcgtccatgcctttctgtcggtgaggggcctgggtccccatcgagcctggcccccgcagaactacaagtcccagcagcccctggggctaaccaccttagcataggcctggcttcctcctggggctcatgggatttgtagttttatggccagagttggttagaagtcggtaggcaggaaagatttatcgtggccagaggcctggaattggggaaataggatcctgaattgcaatgtcctcaaggattggtgagttcccattcccctactgcgaggtttgaaactagccgaagaaacttcccaggcaatgttaaggctgccccattgctggtctgtggttttatgcctacgggtggatgggacttagagtttctgtgacagatatggctatgggaagcatttgtaaagggagcaagcagtgtttcatgtggtcttggagtctgaggctgtcacctagctatcagagtcctcatgatgttagggggatgtccaaccattcctcccttactcgctgataggatagagaaagctacaagtccttgcaggcagtggggcctcccaatgcatttcctgtccttctttccctccagtggctcatgggactcgtagttccttggccagagctggtcgtggggctgggtatccatttcctgggctcaccccttcctgtgttcctacctcgctcagatccccagcctgagtcacagtgtgctgtcacagaccagcttcagggccgagtacaaggccagtggcggcccctccgtcttccaaaagcccgtccgcttccaggtggacatcagctcctctgagggtccagagccctccccgcgacgggacggcagcggaggtggtggcatctactccgtcaccttcactctcatctcgggtgagtctcttggctaggctgcctgcagcccagtgctgggactgttcacgacagctgagacagtgtaggggcccaggagtgcagcagcaggaggaggaaatggtgttcagctggtgccgactctctgtgctcctcctgcccacacagaccgccccacaagcccatcctctatttccccactctcatcagcatttccctggcatttacagtgtaaataatgaatgcattatctccttgaagcttccaagcagcctactgaggtgttagtaatcacccattttacggaggagaaaactgagtcatagggaggtcaatggacttggccagagtcacacaatacactgtcgcagagctgcagcccaacccaggcctcccaacttcagaggagagagcccagctcttcctattactttaagatggtagagccaaagggtgaagacacagcacactgctgtctaatatcagtctgcccagagcagacattaccaattgatggcagtgcttattcctgctaagctcagtggcagcctcaggaacttgaactccaggcagccatgaccagtcgaggcttggcacaagaaaggaaaaccactaaaataccttgcttccagttctgctttctgtttggtccctccatcctgatagtgagcatttggatagggagggatatcgccgatctctttgtcaccaatattaatatgtcacaggtgggagaggggcttgccccaaagatttctaaaccaaacggctgtggaactgtgggtgttccgtcaccaaaaccaatt[139 bp omitted]cctgtctctactaaaaataccaaaataagcctcgcgtggtggtgggctcctgtaatcccagctactcaggaggctgaggcaggagaatcgcttgaactcag[141 bp omitted]atgatggctgactcctgtaatcccagcactttgggaagccgaggtgggaggattgcttgagcccaggagtttgagaccagcctgagcaacataatggacctcatctctacaaaacaaacaaaaaaatttatacacacacacacacacacacacacacacacacacacacacaatttaaaaaaaaaaaaaaagcccagcacggtggcatgcacctgtagtcccagctactccagagtctgacgtgggaggatcacctgattccaggaggttgaggctgcagtgagccgtgatcgcgccactgcactccagcctgagtgacagaatgagaccttgtctcaaaagaaaaaagaaaaagaaaagactttctccgatttctttttctttttttttgttgttgttgttgtttggttttttttttttttgagacagagtcttgctctgtcgtccaggctggagtgcaatggcgtgatctgggctcactgcaacctctgcctcctgggttcgagagattctcttgtcttagcctcccgagtagctgggattacaggcatgcgtcaccatgcccagctaatttttgtatttttagtaaagacagggtttcgccatgttggccaggctggtctcgaactcctgagcaacctcaagtgatctgcccacatcggcattccagagtgttgggattacaggcatgagcccctgtacctggctccaacttatttttcttacatttctggtccttcatggcctccgctagaaactaacagcaagcaatagtatctatttgaatagaaaccaacacctgttatttgaagttgaaggtatgtgagtttgaccgtgatccttaaatagcagcacagacccatttgcaaaccgtggattgatgtggccccagcggagcaggggagacggagatgcagggggggtgttgtgtgcttggtggagggactgggttctgcaggctgggacggccttcccggtcctggacccccagtcagtgtttttctgcccgcctgtgcctctaggtcccagccgtcggttcaagcgagtggtggagaccatccaggcacagctcctgagcactcatgaccagccctccgtgcaggccctggcaggtgggtggtggggccgtgggtggtggggggcgtgggtggcgggggccgtgggtggcggggggcgtgggtggcggggggcgtgggtggcggggggcgtgggtggcgggggcggtgggtggcgggcagaggtccagcatgagcaggtgctctggggtttggtttgcagaggacgcccagctggtgggctccttcaccattgtcgtagctgaggtcttatctgcagagttgtgagcaggttccccgagaggctggggcctgaggagggtctccttagcaacctgaggactggctcccaggagtccctaagaagatgacaggctctgtgttgggggtcagggaacatcctgccaacagaggttctggacctctgtccaggaggacggtgacccaccgtcctggtttgcttgggactgaagggtgtttctgggatgcagggctttgagtctaaacccaggacaaattggtcaccatctttgcaggtctcacaagtcacctcaccctggggctagggcctaatggtccctagcaaccagaattctaagctgagttcatgggaatgtgcaagatcttgctctggggaatccggccttcccgggctcccagtcctggtcatcaaagactcaaattctctagcaatcaggagagcagagggtttgttgcaaaggtgtcttagttcgttcaggctactataagaaaataccatacactgggcaacttacaaataacagaaatttattgctgacaattctggaggctgggaagtccaagatcaagctgccagcagcgttggtgcctggtgagagctgcttcctgggtcacagacagcacgttggtgctgtgtcttcacatggcagaaggggcaagggaactctctggggcctctttcctaaggacactaatcccattcatgaaggccccaccctcatgacctcatcacctcctaacataacctcctaataccatcaccttgggattgggtttcagcacatgaatttgggaggatgcagtgttcagtagagagcataaggggcactcgcccaagcaaccagaggtagccagaattctcaagggaagagagcgcctgccctggaaatcagccctcattcctgagacacggggtcacaggggacacagtgaaacagggtactgggccccattgcagggcacgtggacagccgtctgctctgaggggagtcaggcagcatcagcctcacaggacccatgccccttcctggacccctggaccccgttgaaaggaaacggcccagcgttgaggccaggagccagggcagctttggccttgtcaccagaaactctgagtcccagggtcaggtcttttgctctggagccgtggttctcaactaggggagctggtttcaccccgtgtttgttttctatggccgccgtcaacaaatgacacagccttggtggctgaaacaacacaagtgattttcgtacagtcctggaggtcagaagtcccacatggtctctgcaggctaacagggtgcctggagggctgcacctggaggctctctggcagagactgtttccttgtgtgttccagttcctaggcgctctggttaaggcccgttcctccatcttcaaagccagtgacgccatatatccctctgactgaccttagctgggaaaaggtgactcagtgggacctgcacagatactccaagataatcccccaactcgtggtccctcaccttccccacagcacaggatctcttctgctgcatcaagaaacatagtcacaagttctcggtatttgcatgtggacatctttggagggggccgttattcagcctagcccaaccccctagggacatttagtaatgtctggagacatttttcctcccctcaactggggaaaacagggggatgccaatggcctcttgtaggtggaggccagggatgctgtaaaacaccctacaattcacagaacagccccccacgacagctgggtcccaaatggcagtcgtgctgaggtgcagaaaccctcttttctcatggttgctaggggcaaccggaaagcaaattaggtccactggaccccgttgccgaggaaagctggcctcagcaaccaggggtctcaaaacgggcacaccctggaagatgtaggactaacaggcaccctggggggctcagccaccatctcataaaggagaatggggtggggggtgcaggcctccgagtcaccgtggttgctatgacaagccccccagtttttgtttttgtttttttgagacagaatctccctctgtcgctcaggctggagtgcagtggcgcgatctcagctcactgcaacttccacctcccgggtttcaaatgattctcccgcctc[134 bp omitted]cagcctcccaaaatgctgggattacaggcatgagccactgcgcccggcccactcagtttctcttaaaagaaaaacgaggtctccgccacgggacctcaggtaacatcctaggccccatggaaattgctggagaccacccagcaaccagtgtttccacctcagtccccaagaggaggtggcctcaggacccaggagacagtgacctgagtcaggctggcccagcatgaggggcctgagacccccccgactccaccagtaggctcccttgagcccagttccatggaacatttctccctaacaaccagggtaggagagagtcggggggcccctcttgctgtgaacgttgagcaccgtcctggcaggctgtttcctagcgaacagtatcataaccagaatctgagagtctcctaaagtcaggcccggcccaggcccccttggactaacctggccccagggttgcagggggcatagggtgcagcccccgtcctaggggagtcaggccttgccacttggggtgtgtcctccgagtaaccaattcaaggccaggtgctggacggactgggccttatcagggattggagctagagcctcggggttactgagaccgactgatgaggagactctgcccccatcccctggtaatgggaaccccaaccctgggctgcggaacccacgaaaaacctcttcctcccttgcagacgagaagaacggggcccagacccggcctgctggtgccccaccccgaagcctgcagcccccacccggccgcccagacccagagctgagcagctctccccgccgaggcccccccaaggacaagaagctcctggccaccaacgggacccctctgccctgaccccacggggccggggagggaggggacccccctccaccccccttccgtgccccccaactgtgaatctgtaaataaggcccaaggaacatgtcgggaggggggtggacacaaaaaccggccttgccctgcagggatggggctccacaggccgtgcccaactgggggtggttctaggggaacagggggcgggggagctgtttctattttatttattgattaatttattattttatttattgatcaatctctctgcggggtggggtgggggagggacgggagctggttggggtggcttagcagatccggacagggccctctgtccctgtgtcgtccccaaccccctcttcccgggcccctcctcccctggtcctccccccacgaccttctgtacggatttgctctccggaaggaattctggtttcgcgtgatcctgcctgcgtccgtgtctctgattccgccggcggcaaaaaaaaaaaaaaaaaaaaaaaaaaaaagataataataataaatagccttgatcagggacagctggctggccttggcctctcgattcctgggtgcccagttgcaggggcagggcccgaaggcggggacggggatgctggctgccaccagctgttcagaggccctccgcgccggcacacaggtcctccggctccaggtcagtcagcggcagccccagctggttggagagatctccagtggctcatcttgctgggtgcggggcactgggattggccccatctttcctgcttcactggtgagggcaaggcccgggtcagggtgcctgctacagctggaccggcagggagatgggggaggccggcggggggctgaggctgggccacggctgaacacacagggtgcagctctccagggcggagaagtcaacggctaagagaccgaagagcgcgaacagcagcatggccacgacccactcgcaggccgcagagacgctacgcagcgagcaggcgtggaggacgatcactgccccagggtcaagggccacactgctaccgtgacagacgcggagcccggcctggtctctgtgccgcctcgcgctgggcggaggccgtctctgggtgtccccatcctcagctctccccttcccccgtagctcctcacagacggggcctcgccttggtctccgatgctctccagccggtctccatctcaagctgcttgcacatgctttcctttgcgtgcacccccgttactattgcaatcctaatatcctgaaatgtttctgtctcccttccctgacccagggaagggcctggttgcctccctacttgtccaggacatccagctgccattgctcctgcctgtaaacatgcatggtttcctaaatacgcctccctccctgccgccagcctcggactgtgttttgcaactttctcctgaacatccaccccgctacccatggcctacaggcccttcctgctcactcccagagcctaatctcttccctgtaaaatctgtttctctgagtgtcccctcctccacgacaactccaccatccactcatgtgccccagcagacactcccccggccctctcttcatccttcttggccagctggtcaccccaagtcttgtcctatctgccttacccatctctctccagccctctcctcatgtcttgtgcctttctctcctggtctgtcccgtccctcctctggttctcgcaccctgctagctccttaagacctttttctgctctgccagcccctgcagactccaggcctagtagagacagcatttgttttctggaacttctctcactggagctgctcaccacttcacccctcccagacagcttattccattcattcagggatttctaagggggctgagaagtggtggctcacgcctacaatcccagcactttgggaggccaaggtgggaggattgcctgaggctaggagttcgagaccagtctgggcaacagagcgagacctggtcttttttttgaaacagagtctcactctgtgtcccaggctggaatgcagtggcgtgatctcggctcactgcaacctctgcctcccaggttcaagcgattcttgtgcctcagcctcctgagcagctgggactacaggcgtgtgccaccacacctggctaatttttgtatttttagtagagatagagtttcaccgtgttggccagacaggtcttgaactcctgatctcatgtcatccgcccgccttagtctcccaaagcgctgggattatgggcatgagccacaatgcctgaccgtaaacttcctatggctctctatcacccccaggcagaaacccaagcctctgatccctaattttagagaatcctcagccctggccctgccagcagcctcactcctccctgggctggtctttctgctcggtgcgtgtacctgcagtgtgccctcaacctcccagcccacgagcagctccttctgcaaggccaggctcagaatccggccaggctcaggcccgtctttacagacgtccatcccttacgacactcagctagctgtctttatggttccctcccccacctaccccacccaagagactactgagtcccacagaatgaaggcccctgtggctaaactgatcatcagggctagtttagaagatctgggctggatcttatcaccatcagggcccctgcaaaggagacctaatggtctcataccccaagtcactataggccgggctgaggggccagccctctcaactattttgtgaagatacactttgtcactccaggaaatacgatcaccatttccattttgctgagaaaatttccaagaaacggatgcacttaatacaaccaacacagggccttagctggtttctctgtactctcttctgaatgcctgcacactctgggcctccccacaaatgagaaagaccccccaaggctgggttttcagcccctcctttctctcactcta[135 bp omitted]accccatctctactaaaaacacaaaaattagccaggtgtggtggtgcatgcctgtagtcccagctacttgggaggctgaggcacaagaattgcttgaaactgggaggtgggggttgcagtgagccaagatcatgccactgcactccaccctgggtgacagagtgagactccatctcaaaaaataataataacaagataataataataataggccgggcatggtggctcatgcctgcaatcccagaactttgggaggccaaggcaggtggatcatgaggtcaggagttcgagaccagcctggccaatatgatgaaaccccgtctctactaaaaatacaaaaggccaggcacggtggctcacacctgtaatcccagcactttgggaggccaaagtgggcgcatcacaaggtcaagagatcaagaccatcctggctaacatggtgaaaccctgtccctactaaaaatacaaaaaattagttgggcatggtggctggcgcctgtagtcccagctactcaggaggctgaggcaggagaatggcatgaacctgggaggcggagcttacagtgagccaagatcacgccacttcactccagcctaggtgacagagcgagactccgtctcaaaaaaaaaaaaaaaaaaattagccaggtgtggttggcaggtgcctgtagtcccagctacgtggaaggctgaggc[131 bp omitted]caaatccattttatggatatggaaactgaggcctcagagagtgacctgacccatctagaagtacactgtgctggtggaaagtgcctcggttctggggatggctcagaaatgagttggaattgagtcaagcctcatgtggtgtgctagtaaatgtttaacaactggctctggttggtggcatctgccaattacagtggtataaatactcccatgatggctatttcaagctactcacatgatatcacaggacatggagttcggacgagcagttcacagaatgcctctcagagcctgcgcaagccacctgcagcctatcaccagctccattgcagaacctcacgcgcatcctggccgaaagacttttcctgtctgaacccgtcttcactcgtaaccacatgattcctggcacagagcaggtgccctcaagggactgttcttagtatatcattcttccagcgtctattggtcactcgctatgtgccaggcacagatctaagcaccgtatgcctattatcctatccactccacaaccctgaggtcagccctgtcgttatccacatttgagggatgacgaaaccattgacaccgagaagtaacagcccgcggaagtttcccccagctgctgtgtggaggacaggggcttccaacctgggcaacctgaccccgaagtcggcattctcgatgacaaagccataatcctgtgcaaagagtgaggcccagagaaaggaagagacatccccagtgacagacagccaggcaggaagaccaactccagtgaagagccacctccaagccctaccccggatacaagaaggatactggccacaatgaggatggtgcagacgctgcagaggcccaggcggaggggcccaatccaggcagccccgggctggggcagcctcttcagcctccacaggaggagctgcagccagaagtagacgttacccaagatgaaggcaaggaaggcccctgccaagtgcgtaggccgctggttcttttcctgggaggagaagggagaagttgggagggagactctgggaaggagggtaaggggcaccagaggggccagggcccttcaccaatgcagtagacagtggtcaccaactttccatacccagtgatgggcttattaagcacatcagctattgtcagctccacgagagcaggcattgaaatctgttgttcactgctgtggcctcaattcctagaacagtgatgggcacatagtagatgctcagtaaatatgagtgggataaatcttgcattctcaaggcgggggacagacatttccccaaaaattggtcttgcaggtgaaaaattcttaaatattacaattgtatgtgactcacggatacatagcacatattccattaaaattttaaaatacttaaaattttggcctggtgcggtggctcacatctgtaatcccagctctttggaaggtgaagcaggcagatcactttgagctcaggagttcaagacccacctgagcaacatggcaaaacctcgtctctacaaaaaatacaaatattgccaggcatagtggctcacacctgtaatctcagcactttgggaggccaaggcgggtagatcacttgaggtcaggagttcgagaccagcctggccaacatggtgaaaccctgtctctactaaaaatacaaaaaattagctaggcgtggtggcgggcacctgtaatcccagctacttgggaggctgaggcaggagaatcacttgaacccaggaggcagaggttgcagtgagccaagatcgcaccattgcactccagcctgggcaacaagagtgagactccatctcaagaaaaaaaaaaatacaaatattagccggtcatggtggctcaggcctgtaatcccagctactcaggaggctgaggctggaggattacttaagcccaggaagcagaggttgtagtgagctgagatggcaccatcgcacaccagcctgggcaacggagcaagatcccatctcaaaaataaataaacaaataataaataaataaaataaatacttaaaatttcatgggaagaggggagaaccagggggaaatgtctaaaaatactccttagaggagcaagataataataataggttgagggctgggcacagtggctcatgcctgtaatcccaacacttagggaggccaaggtaggcagatcacttgaggtcaggagtttgagaccagcgtggccaacatggtgaaaccttatctctactaaaaatgcaaaaagtagccgggcgtggtggtgagcgcctgtaatcccagctactctggaagctgaagttaggagaatcacttgagcccgggagatggaggttgcagtaagccaagatctcaccactgcactccagcctgggccacagagcaagactctgtctcaaataaataaatagttgtggagcactttgggaggctgaggtgggtggctcatttgaggtcaggagttcaagaccagcctggccaatatggtgaaatcccatctctactaaaaatacaaaaaaaatttagccaggcctggtggcaggtgcctgtagtctcagctatttggtaggttgaggcaggagaatcgcttgaacccagcaggcggaggttgcggtgagccaagatcgcactactgcactccagcctgggtgacagagcaagactccatctccaatatatgtatatatataaatatattctctgtggtccatgggcaatgagtgacctagctagagtcttcatggagatggaatgaagtcatgtacaaaatggaaagcctgctgccaatggctgccaaatgctcaatcaatgtgcctaacatgaagaatgagtaaatctcagtcatttctttttggagacaaggtctcactctgttcaccaggctggagtgcagtggcacaatcacagctcactgcagcctcgacctcctgggctcaagcaatcctccatcttcccacctcagcctcctgcatagctgggactacaggttcacgccaccatgcctggctaattctttattttttgtagagacagagtcttgctatgttgtccaggctggtcttgaactcctgggctcaagcctcagcctccaaagtcctgggattacaggcatgaaccactgtgcccagcctcactaatttcttttttcttttcttttcttttttgagactgagtctcactcttgcagcccaggctggagtgcaatggcatggtctcggctcaatgcaacctctgcctcccgggttcaagcaattctcctgcctcagtctcctgagtagctgggcttacaggcacctgccaccacccctagctaattttttgtatttttagtagagatggggttttaccgtgttggccaggctggtctccaactcctgacctcaggtgatccacctaccttggcttcccaaagtgctgggattacagccgtgagccacagagcccggccagtaatttcatcttcttcttcttttttttttttttttttttttttttttttgagagaagtctcactcttatcccccaggtttgagtgcaatggctcgatctcggctcactgcaacctccacctcccaggttcaaatgattctcctgcctctgcctcccacgtagctgggattaagtcgcctgccaccatgcccggctaatttttgtatattttaggagagacggggtttcaccatgttggttggccaggctggtctcaaactcctcacctcaggcgatccgcctgcctccgcctcccaaagtgctggaattacaggcatgagccactgcgcctggaccagtaatttcatcattaaataagctggggagaggggctggcagaaaattatcccaacgtcctggaagtcaacgaagtcctacatacaaacagcctcgctcgtagtgccccactcagagagcaaaggaatccagccggtccaaggccactggccagagaaaaatacaagtcccaggagggccgggcgggaaccagcccccgagacaataagcctatggccacggggcatgctgggagttgtagttccagacgccggccgggacagaccctgggcgccgactgggtctcacctggaaattgcctaccacggaggtgcccagggcacacagaagacccgtccataggatcagctggttaggccaccttctgacgccccagtcccggagctggtggtaacggacaatgcagatccacgcggctgggagtagaggggagaaggaagtgggagggagacccaccaagaactcctgggacccagggagggaagtgaggggagcaaggtgagggagaaagtggcaaactcccggattttggggaaagaggggcctggggcatggactcctgggtttgagaaaggagcggtttcggaactcgcttggctgggcttgggagcactgaaccaaagggctgggcaatatttacccagagcagctcccatattgagcacctggctgaagatgcagctctgaggggggaaggatccgcagatgctggggaagacaaaggggtcatcctgggcaatccaagctagggcctccactttcctgcagcggcgatccccccaaatccctaccctcgggcagaattacctgatgtagggaaagcctttactgaggtccacagtcctgttggtcactgcaatggcaaaactacggaggaaatcagagtgagtgggcgactctcaccaacaacttttccttctgttaaccaaacaaacaaggacttctagccccctccaccctcagaccaggagtccaggcccccagcccctcctccctcagacccaggagtccagatcccccagcccctcctccctcagacccaggagtccagacccccagcccctcctccctcagacccaggagtccaggcctccagctcctcctccctcagatccagggatccaggcccccaaccccttcctccctcagacccagaaatccaggccccagccccctccaccctcagacccaggagtccatcatgcctctgacactcacacgatccagacgccagagatagcccagacagctaggaagacaggcatcagcgacaggtagccccacatgccgggctctgcaggtgaaggatcggggctgaggctggacacctgtctctctcacacctgaagaaccagccctcaaggagggcccaggtgcatgagattgtggccccaaccactaggccccgcttggctctcaggcagaagtcacctgtaggggtctgatctgattggccagctctccatttccaggcaatttccccacctatcccgcagtgttcaaccctatctcacgcattctcctgcttgaggaatttctccctgtcctcccagcccctccttgcacctcccagcctctccttgcacctcccagcctccaggacctcctggagatgctcacctctccaagatccctggggctctcagtcctgggactggggctgggtgagcttagggaagaagggctggcattcgggatggggctcagacaggccaaggcagaggcaaagtcccagctggagcgctggagggctgcctggggtcttgggtctgaccaacacttcctgaggggctctctacctccaaaccgccatgtcctccctcctcagaacctagcaggcagcaccttagcttcaggggcccctaacttccttcctccagctttgtgggttcaacgtccaaagtctcagcccttccctccccaggaaccaggaatctgagcctccagctctctccagcctggaagacccagaattccggggccccagttcctcctagaatacagatattcttctccagctcctgatgtccaacctcccagctcttacctactcgggtacccaagagtgagggcctcaggtcggcctgctctctgggtgaagcttctgttttggggctgggagatatggagcactgacaaccctgcctcctcccctccactctccttcctctcacccttctccttttgcctgctggagttccccaggcaggctgagcatgggtgggaagggagctttcagcgatgacatctccatccgaaaattcccccagccagacaaagactgctcctgccgcctgacccttttccttctctctcccaacagccatcttcagcttctgacctcctcctggcttggtatttagggatttggagtcatggcctcttccttcttcccaggacccaggagtccagtccctcagcccctcctccctcagacccagggtcagacctctaggccctccttccttagactccggagtccctcctgcctctgacactcacgaggtccagaccccaagatagcccagccagcagggacagggacaggtaagcctcacatgctgggctctgcaggagaatgagaggggctgaagctgggcccctctcgctttcctctttctctctcctccccttcacacctgaagaaccagccccttggggagggcccaggtgcatgagattgtggccacggcctctgggcccccattggctctcaggcagacgtcacgggtgggggtctgatctaatcggccagctgtcctccactccaagcaatctcttcacctgtttcagtgttcagtcctagctcacacattctcctgcttggggagtttctccctgccctcccagcccctccgtgcacctcccagcctccagggcctccccaggatgctcacctctccaagcttcctggggctctcagtcctggagctggggctgggtgagctcagggaagaagggctggcattcggggtggggctcaggcagacatcctgcagaggcaaagtccaggctgcaggactgcctgggtcctttggtctgactgccacttcctaacggctctctgtccccaaaccaccgtgtcctgtctccttagaacctcacaggcagcaccgtagctttgggggaccctaatttccttcctccagctttgtgtattcaacatccaaactctcagccctatcctcccctggactcagatcggagcctccacccttggggacccaggagtccaagctccaactccttcctccttccccaaaatgcaggagtccaggcccccagaactcttcccttagacacagaagtcccagccacctcctctctcactatgccacctcgtgtcttttaatggacataaaatccacataacattagccattttaaagtgtacgactcggccaggcacggcggctcacgcctgtaatcccagcagtttgggagaccaaggtgggcagatcatctggagtcaggtgtttgagactagcctggccaacatggtgaaaccccatctctactaaaaatgcaaaaattagctgggtgtggtggcgggagcctgtaatcccagctactccggaggctgaggcaggagaatcccttgaacctgggaagcagaagttgcagtcagtccagatcatgccattggactccagcctgggtgacaagagcaaaactctgtctcagaaaaaagaaaaaaaaaatgtgcgactcagcgacattagtgcactcccaatgttatgcaaccatcgcctctttctttttttttttttgagacagagtctccctctgtcacccagattggagtgcagtggcgcaatttcggctcactgcaacctctgcttcccgggttcaagtgattctcctgcctcagcctcctgaggagctgggattacaggccggtgccaccatgcctggctaatttttgtatttttagtagagatggggtttcaccatgttggccaggctggtctcgaactcccaacctcaggtgatccacccgcctcaggctcccaaagtgctgggattacaggcgtgagacactgcgcccaaccttttttttttttttttttttctgaaacagagtctccctctgttgcccaggctggagtgcagtggcacaatcttggctcactgggacctccacctcctgggttcaagtgattctcatgcctcagcctcccaagtagctgggattacaggtgcccgccactatgcctggctaatttttgcattttttgataaagacagagtttcaccatgttggccaggctggcctcaaaatgctgacctcaagtgatccccctgcctcagcctcccaaagtgctgggattacaggcggaagccatcgcgcccaacccgtctggtgtattttatgctcagtgtaatgtttttgagattcatccatgttgtggcatgtattagtgtttcattcctttattttttatttttattttttaaacagccagggtcggctgggcaaggtggctgacgcctgtagtcccagcactttgggaggctgaggcaggtggatcacctgaggtcaggagatcgagaccagcctggccaacatggtgaaaacctgtctctactaaaaatacaaaaaaaaattagctgggtggccgggcatggtggctcacgcctgcaatcccagcactttgggaggccg[132 bp omitted]gaggcaggagaatcgcttgaacccaggaggcggaggttgcagtgagccgagatcgcaccactgcattccagcctgggcgacagagtgagactccgtctccaaaaataaataaaataaaataaataaataaaataaaaaataaatcctgtcccagtggggctgatagagggcaaagctctccaagtcctcctcaccccttctgctgccaaatgcctctcctctgggtctcgtcttcctcctttcgcttctttttccggaggtctccgtttgcccagacatgaatctgagccaccccctgccctcaggggaatccctgtctgtgggcaacacagatgatcagcaggtgacagctcctctaaaggaagtcacacaaagctatgagggagcccaggggagggaggggtccatgctacctgctcctccgtcggccctcaacactgatctcctgccctgccctgtcctgtgtttgccacctggctgattcccacttctcttccaaaaacataataataataaagacgagaaagcccaggtgatcctaaggaagacttgtccccgctctgagcctccatacccaactcggtgtcctggcacaaagatgagtttggctcactggtgtccccacggtgcttatgtgacctgcttggaccctccctgggaggacaggggacagggctccagcctgccgagctactttcaagttgggaattaggccccactcaccggccacgggtaggttgggtgtctggagcctgaaggatccttccagaagctagggctgctggcctggctcagccgaggggaagaggctgtgcttttcctctgagaaagatgacgttgcactttcatattgaggaaaccgcttgtggttggtggtggggactggtttttatttttatttttatttttttattttattttttatttttgagacggagtttcgctcttgttgcccaggctggagtgcaatggcgcgatctcagctgaccgcaacctctgcccccgggttcaagcgattctcctgctcagcctcccaagtagctggaattacagtcatgcaccaccacacccggctaattttgtatttttttagtagaaacagggtttctccatgtcggtcaggctagtcccaaactcctgacatccggtgttccacccgcctcggcctcccaagtgctaggattacaggcgtgagccaccgcggccggcctatttttatttttatatccctagatgtctatgtcccctgcctggaagtttccccagagaggggatgtagacgtctaggaacacagaggtctcagaaccttccccagggaggggatgtacacctctagagatagatgggtctcggacctctgttttcttgtctgcaaaacagggatcatgatggtctgccctcgtgcaattgtgagggtttattggggttatccacataagaccctaaaagaatgcctgtctgaccgggcccggtggctcacgcctgtaatcccagcattttgggaggctgaggcgggtggatcacctgaggtcatgagttcgagaccagcctggccaatatggcgaaaccccgtttctactaaaaatacaaaaattagctgggcatggtggcgggcgcctgtaatcccagctactcaagaggctgaggccggagaatcgcttgaatccaggaagtggaggttgcagtgagtcgagattgtgccactacactccagcccggacgacaagagcgaaactccctctcaaaaaaacaaaaaagaaagaaagaaaagaaaagcaagagattgactggggatgaggttgctgaaggataaaggaggagaaaggccaggcgcggtggcttaagcctgtaatcccagcactttgggaggc[137 bp omitted]ttcagactgcaacgtgagtgggtctgggtctgacactggagaaaggagatggggagagtggaagaatcacagaccatgtgcagttctgagaaccccggtcaggtcagctgggaaatgtggtgcaaagatcacccatacgcaagtccatggagaccgaaagcaagtcagtggttgcaaggggtgggaagaggggaggatgggaaatgattgcttatttggagtttccttatgggggttatgaaactgttttggaactagatagagacgaaggttgcacaacattgggactgtgctagacgacaccgaattatactttaaaatgcttagagtgggccgggcgccgtggctcacgcctgtcatcccagcactttgggaggccgaggcgggcggatcacgaggtcaggagatcaacaccatcctggctaacatggtgaaaccccatctctactaaaaatacaaaaaaattagccgggcgtggtggcgggcgcctgtggtcccagctacccgggaggttgaggcaggagaa[131 bp omitted]atttaaaaattaaatttaactttttttttttttttttgagacggagtctcgctctttggcccaggctggagtgcagtgacgcgatctcggctcactgcaagctccgcctcccgggttcaaaggattctcctgcctcagcctcccgagtagctgggactaaaggcgcccgccaccacgcccggctaatttttttttttttttttttgtatgtttagtagagatgaggttccactgtgttattcaggatggtcttgatctcctgacctcgtgatccgcccgcctcggcctcccaaagtgttgggattacaggtgagagccaccgcgcctggccaaaaagttaaatttaataaataaataaataaacactttagcacattgactttagaggtgtccacattgggcagaaacggccaggctctgctccccaccccatgcttagtcatcggtcaaggctgcataaaaagaatgtaatagcaatccaaatcaaacactgctgaaggtgctactgctggaggctggagaccagctgaagtcctccctgctaatcaagttctttcaggaagggtgagccacctggctaccgtacttgcccaatgtcactcagctaccgagtggagcagcttgggtctgtctggctgtaaagtttggttccttcctatgtgccatgcaatgcccttgaatatccctccttatcttcacccatccaaccttctcctgaaacatccatttatctgtgcatatgttcatgcctttgtgcattcctccagctagttatttctccactcatccacccacctgcctatccggccagccatttgctcatatgttcttttttttttttttttttgagatggacttttgctcttgttgcccaggctggagtgcagtggcgcgatctcggctcactacaacctctgcctcccgggttctagcaattctcctgcctcagcctcccgagtagctggggttacaggcacctgccaccattctacctagaagtagaattactgggttgtatagtaacatttttaggaactgctaaactactttccgccatgtgtacacgatttacaccattttacattcctgacagcagtgcatgagggtttcaatctctccacaccggcaacagtgcctgctattatcggtctttttaaaattacattacaatcttttttagggatgagatctggctttgttgctgaggccagagttcagtggctattcacaggtagtgtcatagcacactacagcctcgaactcccggcctcaagagatccctttgcctggccaggagtcatgcctgtaatcccagcactttgggaggctgaggcaggcggatcacttgaggtcaggagttggagactagcctgaccaacatggcgaaaccccgtctatactaaaaaaaaagaaaaattagctgggcatggtggcacacgcctgtaatccgagctactcgggaggctgaggcaggagaatggcttgaacctgtgaggcggaagttgcagtgagccgagactgcgccattgcactccagcctgggtgacagagcaacacttcatctcaaaaaaaaaaaaaaagagagagagatcctcatgcctcagcctcctggcctcaagagatcctcctgcctcagcctcctggcctcaagagatcctcctgcctcagcctcctggcctcaagagatcctcctgcctcagcctcctggcctcaagagatcctcctgcctcagcctcctggcctcaagagatcctcctgcctcagcctcccaggtagctggaattacaggcctgtgccaccgtcccccatttgatgtgtctttctgatggtaatcattctggagggtgtgaagtggtgtctccttgtgggttgaatttgtattgccctagtgactaatgacgttggacatttttccatgcattcattggctatttgcatatttctttggagaaatgtcagatctttgttcatttttgaaattcggttgtctgtctttttattattgagtcataagaattttttttttttgaggtggagtctcactgtgtcacacaggctggagtgcagtggcatgatctcggttcactgccatctccacctaccaggttcaagtgattctcctgcctcagcctccggagtagctgggattacaggtgcctgccaccataccaggctaatttttttttttttttttgtatttttagtagagacagggtttcaccatgttggccaggctgatctcgaactcctaaccccaggtgatccacccgcctcagcctcccaaagtgctgggattacaggtgtgagccaccgtgcccggcttagggattctttgtgttttttttagatggagtcttgctctgtcgcccaggctggggtgcagtggcgcgatctcggctcactgcaagctccgcctcctgggttcatgccattgtcctgcctcagcctcccgagtagctgggactacaggcgcctgccaccatgcccggctaattttttgttgttgttgtttagtagagacagggtttcaccatgttagccaggatggtttcgatctcctgaccgcgtgatccgcctgccttggcctcccaaagtgctgggattgcagacgtgagccaccatgcctggccaaggattctttatatattctggattataaggcgatcattatcagatataatgatttccaaatattttctcccattcaatggataacaatcctcttttgacctaatattccctcttttcttcaggatctgacttcttgcattgttgtggttagtcattgactcattcagcaatttttttttttttttttttgaggctgagtcttgctctgtcacccaggctagaatgcagtggctcaatcttggctcactgcaacatctgcctcctgggttcaagcgattctcctgcctcagcctccctagtagctgggattacaggcgtcgccatcacacccggctaatttttgtattttcagtagagacagggtttcacca[139 bp omitted]actgctttttgatattgagactcaactctgaacaggacaagggtcctgccctcctggcacttatgttctagcaataaacgaataaataaagagatatgtagtggtagccagggggaggtaacctgtgtagccaccaggggccccattctcagaagc[133 bp omitted]actccatctctactaaaatacaaaaaattagctaggcatggtgggaccttaccagggtgagtggtgggaagaatagttccaataaggtgagagaggtaatgaggggacaaactgggcggggcccgggggccattgtaagaaagttagatttttttttttgagacggagtctggctctgtcatccaggctggagcacagtggtgcgttctccgcttactgcaacctctgcctcccgggttcaagtgattctcctgcctt[134 bp omitted]gcctcccagagtgctgggattacaggcgtgagccaccacgcccggcctagaaagttagattttaatctaggcgtgtgctaattcagcacagcaactccagaaaacgataaacatttacttcacctggtttttatgggtcatacatttcggaacggcttagctgagcgattctggttttggggtgcttggaaggttgcagtaagacatggaccagggctgcacagccacctgaagacttgatggacaccggaggattattgccggggtggcccaagcacgtggctgacgagctatcgggaggcctcagctcctctccggctgctggcttgaggcttcagttcctcgaaacatggacctctccgcagggcagctccaatgtcctctctctctctctctctctctctctctctctctctctctctctctctctctctctctctctatatatatatatatatatatatatatatttttttttttttttaaagacagggtttcgctctttggcccaggctggagtgcagtggcgcaatcttggctcactgcaacctccgcccaccgggttcaatgattctcctggctcatcctcccaagtagctgggattacaggcacccgccaccatgcccggcaattttttttttttttttgtacttttagtagagacagggttttgccatgttggccaggctggtcttgaactcctgacctcaggtgatccacccacctcagcctcccaaagtgttaggattacaggtgtgagccaccgtgcccggcctgcaacgtcctcttgacatgggcatcccagagagagcaaagtgaaagccacagagtttttttaggatctaacttttgacacaccatcatttttgcaatatcctgttggttacacagctcagcactgttcgaggtggaaagagccacacaaggatatgaatcccagaagtggaggatggggggccgggcgtggtggctcatgcctgtaatcctagcactttgggaggctgaggtgggcggatcacaaggtcaggagttcgagaccagcctgaccaacatggtgaaaccctgtctttaccaaaaattcaagaattagccgggcttggtggcgcgtgcctgtaatcccagctactcaggaggctgaaagagaggagaatcctttcaacccaggaggcagaggtggcagtgagctgagatcgcaccattgcactccagcctgggcaacagagcgagactgtctcaagaaaaaaaaaaaaaagaagtggagaatggggggtcattgagggccgttttgggagctggctaccacaaaatatcaattcattgcaaaatttgagtaggagaatgatgaggtgtgtgtgtgtgtatgcaatcatatatgtatatagatatagctatataggtccgtgtgtgtatataaattaatatatagtatacaataagtatacttatagggccagatacagtagctcatgcctgtaatcccagcactttgggagcctgaggcagtaggattgcttgagcccaggagttcaagaccagcctgggcaacatggcaagacctaatctctacaaaaaataagaaagccaaatgtggtggtgcatgtctgtggtcccagccactcagaaggctgaggcaggaggatggcttgagctcaggaggtcaaggctgcagtgagctaggatcacaccactgtactcgagcctgggcgacagcgtgagaccctatttaaaacaaacaaacaaaaattattgaatatttgaccaggttcccgctgaggctgagccttggaatctgtattttaatcacattcccaaggtgactttgactccccacaccccacctttttttctttctgtgtgtatagttcaacacaaaaaacatcaaattcaccattttacagccagatgccgtggctcacatctgtaatcccagtgtgtgggaggctgaaactggaggattgcttgaagccaggagttctggaccagcctgggcagaatagggaaatcccatctccacaaaaaatttaaaaattagccgggtgtggtggcatgtgccggcaatcccagctacttgggaggctgaggtgggagaattgcttgagcccaggagagcaaggctgcagtgagctatgattgtgtcactccagcccgggtgacagagtgaaacgctgtctcaaaaattaatgaattggttaaaattttcattttaattaaagtgcaaaactcggtggtaggtgtgtgagcaatgtcgtgaggccatgccgtgagttatgatcacaccactgcacttccacctaggtgacagagagacacttatatgtgtctctaaatatatatataccattttaactattttattttatttaccattttattattttttgaggcggagtctctttctgtcacccaggctggagtgcaatggtgcgatctcggctcactgcaacctccgcctcttgggttcaagtgattctcttgcctcagcctcccgagtagctgagattacaggtgcctgccaccgtgcctgcctaattttttgtatttttagtagagacagggttttgtcacgttggccaggctggtctcaaactcttgaccccaggtgatccaatcacctcagcctcccaaagtgctgggattaccggcatgagccaccatgcccggccccattttaactgttttaaagtgtacagttcagtggtattaggtacaaccatcaccactatctacttccagaacttcttcatcatcccaaaaggaaagcccatacctgttagcagtcacttgccccagcctctgcaaccgcgaatttgctttgtgtctctatggatttacctactctggatatttcatagaaatggcgtcgtaccgaatgtggcctttcatctccggctcccttcacctagcatgatgttttcacgggccatcggtgtcccagcatgagtcattccttcttattttattatgccacctgaagtctgagacccaccccgccagctttcagcagctggtttctttctgggcagtgcggccgggagcttgagagtgcaaagtgcactagactctggagtcccatgacttggatgttaactctgggccggttacatcatctctgtaagcctcactttgcttatccgtaaaatgagcattataacagcccctccctcacagggctatttgcaaagtggctgctgtgtggtaagagttcagtaacagctttcatgttattccatgttgtgagagattgagagatgctagaattcgtccaactatgtcctattgttggacattcttttctgttttttgtttttttttccgacattttgctctgtcgcccaggctggagtgcaatggtgtgatctcgcctcactgcaaactccgcctcctgggttcaaatgattctcctgcctcagcctcctgagtaggtgggattacaggcgcccacgaccacgcccggctaatttttgtatttttagtagagacagcatttcgtcatgttggccaggctggtcttgaactcctgacctcaggtgatctgcccgcctcggcctcccaaagcgttgggattacaggcgtgagccaccgcgcccgacctacttttctgttttttcaacaatgctgagtgatatgatttggctctgtgtccctacccaaatctcaccttgaattttaatccccataacccccacttgtcaaaggggggaccaggtggaggaaattgaatcatggtgaacccccatgctgttctcatgataatgagtgagttctcaggaggtctgaaggttttattttatttatttatttatttatttaaagatggagtcttgcttgttgtcgcccaggctggagtgcaatggcgccatcttggctcaccaggacaacagaatgagactctgtctcaagaaaaaaaaaaagaataaaaccctggaagtggaattggtgggtcaaaattttatttgtattatgaaat[137 bp omitted]ccatctctactaaaaatacaaaaaaatgagccaggcatggtggtgggcacctataatccctgctacttgggaggctgaggcagagaattggttgaacccgggaggcggaggttgcagtgagccgagatcacgccactgcactctagtctgggcgacagagtgagactccgtctctaagaaaacaaaaacaaacaaacaaa[132 bp omitted]aaccccgtctctactgaaaaaaaaaaaaatacaaaaaaattagccgggcgtggtggcaggagcctgtaatcccagctactcgggagggtgaggcaggagaatggcgtgaacccgggagacagagcttgcagtgagcggagattgtgccactgcactccagcccgggcgacagagcgaggctccatctcaaaaagaaaaaaaaaagaaaaaaaaggaacagacagtaaatataatgaactgatgaactcatgtcagt[136 bp omitted]agtgaaaccccatttctactaaaaatacaaaaaattagctgggcgtggt[132 bp omitted]tcaagataaaaaaaagaaagaaaagaaaaagaaagaaggaaggaaggaaagaaagggaaagaaagaaagaaaagaaagaaagaaatgcagttttgttacaggtgtagttaaaaaaaatagagataaaaagaaaaatataatgaactcatggattccaccacagggcttaaacaaaatttccaaataccaatgtcccgtgtagctttcccgattgcattcttccctccccaccctcaggggcggccgcttccctccccatgctgtgttagtcatgcccttcacgtgtgtatccttttgccacatgtatccacatgcaaccattgttttgttttgctttgttttttgagatggaatttcgctcttgtcatccaggctggagtgtagtggtgcaatctcggctcactgcaacctctgcctcctgggttcaagcaattctcctgcctca[219 bp omitted]gtagacttctgcaactacgggttgtcccgggtgatatatgggacactggtgcatctactttcactgacatatggtgttcccctgtatcaatataccaggatccatgtttccattcttctggtgatggaaaccgtttccagttcctcaccgttacaaacacgatagcgagcattcttgcatttatctctttattccaagtcggagagtttctctagagtgtacacccacccactagtagaaggactgtacttcatacagactgatacaacttttccagttagctgagtttccatgaagtcctttatgcttgccatttccccctccctgggtaaggctgcttttctcttctggagctggtcacctgtccctccccactgatgaccaggagttacagttggcatcaccttgctctggtatggccacctctgtccacctctgtctcctctagctgctccatggcaagtccccagccccagttcccttctgccggcatggtcctggtcaaagtgatggtcccgagaaaggtttggtcgactttagctgtagtggtgcctgcctgagttagggggtatttcagagctcatgagagattagggaggtaaagcatggggctaggggatagtccctgttggagaagaaatagcatgaacaaagggtggaaagctggaagccaaacaagtgtatggtctatgttttatagatgggaacccaaagcccagagatggcaagtcacttcctcaaagtcacagagcaatgcagagactgtcagcttcatccttattggttggtcattcacacattcattcagtacatattaacaaagtgcctaggccagccatggtggctcacacctgtaatcccagcactttgggaggctgaggtgggtggatcacctgaggtcaggagttcaagaccagcttggccagcatggcgaaaccccacctctactaaaaatacagaaactagctgggcatggtggtgggcacctgtaatcccagctactcaggaggctgaggcaggagaatcacttgaattcgggaggcagagagccgagatcgcaccactgtactccagcctgggcgacagagcaagaccctctctcaaaaaaaaaaaaaaagaagggagcatcacttgaatgagcccctagagagaccctgtctctacaaaaattaaaggattagccgagcatggtggcatgcgtctgtggtcccagctactcaggaggctgaggctgtaggatcgcttgaacccaggaggtcgaggctgcagtgagccatccttgcaccactgcactccagcctgggcaacagaggaagaccctgtctcaaaacacaatacaggccaggcatggtggctcatgcctgtaatcccagcactttgggaggctgaggtgggtggatcacctgaggtcaggagttcgagaccagcctgaccaacatggtgaaaccccgtatctactaaaaaaaaaaaaaaaaaaaaaaattagccgggcatggtagtgcatgcctgtaatcccaactatttgggaggctgaagcaggaaaatcgcttgaacctgggcggcggaggttgcagtgagccgacatcgcaccattccactccagcctgggcaacaagagggaactctgtctaaaaaaaaattagccaggggtggtagtgcatgcctgtaatcccagctacttgggaggctgaggcaggagaatcgtttgaacctgggaagcagaggctgcagtgagccgagatcactccactgcactctagcctgggcgagagagcgatactctgtctctgtctctctctctctctctctctctctctctctctctctctctctctctctctcacacacacacacacacacacacacacacacaccaaaacaccaaaaacagcacaccaaaacagcacctactctgtggcatgcattgttttaagtgcccacgatctatagctgtacagtggagcgcatgtctgacagtgatcctatatgtgtagacacacaagcgcctacattgtgttaccggacagtaacatgctgcacagctgtgtggcccaggagccgccggccaccttacagcccaggtgccagcagccctgccacgtaggtgtgagtgatgttgctctaggatgctggcaggatgacgacatcgcctgagcacgcactgcccagatggtatcagtgtcgttaagggaagaatggctgtggcgaaacaaacaaacaagcaaacaaagaccgcctgttctgagtgtggagcttattattctcggcgtaattatgatgaattgttagttacgtttgcctctaggattgaggtagggggggtgatcccaattagggggtgccccaggggagcgccccaggagtcagggcttgtctcaaaagtccccactcctccctcagcctcccctccctccatccgaccccgttcatatcgcgggaaggtcccacagagtgcgtgtggatactcccaaaacgcaacggtgtaaacggggagggagggagagagactgaggagccctttgtagccaggcagagctgtcaataaagtttcgtcgccttggtaaccgcaggcctcgcggggcgggaggggagagggatggcggtgcgcgcgcattcaccgcctccctcccgccgggtctggctttctccctcctgtggccgaagctttcctcggagaaatagaagagggaggccgcgactctatggtgatggacggaggccttacccaatggaaagaggagctgtcccaaggccaggcaatcatatacgactactggagctggcagagcccgccctctttccacttggacctgaataacccgacccaaaccgagtttcgcccggagagactgcgctttcggccaatgagtgcgtcgatttcgagccccagtgtgagcgaaggcgggacaagtctccatggcagcgactaaaggacagcgatgtgaaccactgacaacagttcgcggcgtttgacggcggcgggggcgtggcggggttttatctgtgtattgacgagagccgggcgcggagggaaagagtggggcttggccaatgggagcgccgtgagcttcgtagcaacggaggagtggcggtggctgtggccaatagaaagcctcagtggccttggcggggctggcccggagagcagatgggaggtgcggcgacagtgtttgacgagagccgaaggaggctgtgggaggtgttggcggcggcggcgcgggcgcctgaggaggaggaggagaagcgggtgaggggcggcgcggggcccgatctctgagccccttcacggccccagccccgcgccgccttggctccccagtcgccccctgccccgactgccccccaccccgcccggcccctcctcgtgtccaggcgcccacgtctcccggcccctcgccgggcctcgggctccgcggcactgcagcctccttcctgtgcttcctcacccgggccctgacccccttcttacgtccacggccctccctgcatcctcagggcctctccctgacctcttgtcactctccaggcctctccctgcaccccccagggcctttccctgacctcaccctccaggcctctccctgcacccccaggtctctccctgcaccctcagggcctctccctgacccttctctcacccccgggacctccctgcactcccagggccaatccccgacctcctctcaccctccaggcctccttctggaccctctaggtctttctgtgccctagaacctctccctgacccctctgtccctctcctggcactccctggaccctgaggtcggcctctgaccctccaggtcccttgccctgggctctcaccgcctacccaggcgcctccctgggtccccaggcccttccctagggtctccctttcctggatcccccaggaccccaccaagcccgtttggatccctgggcccctgtccgccctctcaggcccttcactcactggacacccaggatcttctccgccatccctggaccgccccccgacccaggtctcccgtctggctcctccctgagtccctaggccattccccgctctctgtcctccctggcacccccatcccttcctcacacccctctgagcgcccccaggcccggctgcagccttctccctcccacagccccctgccgtgcccaccgctgtgcgtttctctccttgcccccagccccctctccagcttccccgctgtccctggcgtcctcctgcagcgccccctctttctctcccgcagcctcgcagtctgtccccgacccctccacagccgtctctgcagctcccgctccttgccctgccccatctcctcctctcctgggcgcggatgagcctcgagcgccgtggtgcggggacgaggctggccctccgtccgggttaggggtttgggtggttttcttcatctctccgttctctcctggctccgctttaaaaaaatgtttttgtaaatattgacctgtgctgcctccccatagtcttcctttgctcccctccccacccccgcttttgtcctctgagcccccctcccctggaatccttggagagggagcaggtgctgggatccctcccctgccctccctcccgtcacccgcctccaggctgcctggggcttcacccggagcctcctgaccactcccgaaggctgccggggaggcagggggcggagaccgaggctgggtcgaggtgggggtggagggcgggacctcgggctggcgggaagctttgacttttcctccttgagggctagaggtgaagcggctccccacggtgctaagcctttagggtgatcccggctgccaatcagtcagccttctctgggcccaaagagatgtgtgtgtgtagggggtctctgtacatatgggcaggggcatctgcgtgtgtcagtctgagtgtgcatgggtgtgcatgtgggggttgtgtgtttaggggggatctgtgtctgcgctgcggagcaagagcaagagctaaggcgatggctgacatggctctgggctttccctactctcagaagtacttgttgcattccatcttcgccagcggcctggtgaagtcagcactgcttttctccccattttgcagatgagatcgtggggctcaccagcgtcccccatggcttctgagtagcgtgggagtggagtcagcaccaagccaggctccccgcgcctgccttgccctcacctgctcctgctctctgccagaggcagcatggtccgcagggcaccatggggcccgacagagtgacagcacgagaactgtgcgagaacgacgacctggccaccagcctcgtcctggacccctacctcggtttccgcacccataagatgaacgtcaggtgaggtggcctgggggcgagggtgggcccgaggggtcaggacccctccccttgcaccgctgccgcccctcggccctctccttagcctggtcctcccctcagctccaagtgggggttggggccggggcccgggaaggccctgggacccaggcatgccctctcccccagccctgtgccccccctgcggcgacagcagcacctgcgctcagcgctggaaactttcctgaggcagcgggacctggaggctgcgtaccgggccctgacgctgggaggctggacggcccgctacttccagagccggggcccgcggcaggaggctgccctcaagacccacgtgagggcgccctcccctcccccgccctcaccgcgtgtcctccccgctcaccgggcctggtcccgcctggcagacgctctagagtccctcagcgcagcccctggggccccctgacttcctagcccttgggaccatctgaggcaaggctcagagaatcctaggagaggagagttgggggggccctctgagatgtagtccaacctcttcatttgacggatgaggaaactgaggccccgagagggaacatgaggcccccaagaccacacagtgagtcagtggcatggcaggcctagagtcctggagagagagggccaaagatgcccctgccccgcctcctcacccccaccctcaccctcaccaggtctatcgctacctccgtgccttcctgccggaaagtggctttaccatcctgccctgcacgcgctactccatggagaccaacggggccaagatcgtgtccactcgtgcttggtaagagggcaggactccctgcaggtatccttggaggagacagagctcagaggggacaagagagaccctctgttcatggactggccaaccggggaaaagcgaggggcctggtcctccgggcatcctaggaaggtggtggggctaatcccggaagacctttgtggctaccgtggtgccgctggagcaggagaccccggatgtgaccccagggttcctggggcttccaggaaagaactaggcttctggtcagggccgtgctgtccttacctccttgtgacctgagcccccaccacatgttaaacacccctgagtgcaatgaggagcccctgcccctgcccctgcggggttcacagtctggtgaggaggtggggggcagacaagtcaacatgcagtcactggtcccagctggtacatgctgcaggggagctgtgaggaatgagcaagtgctcccagggcgaggctcacactgacaggggaagcacccgcctgagggtctggtggggcgagtagggggtagtccaggcaggagggatttgggggcaggaggtgctatgagagcgaggggagagaatgggggctgtatctgctgtgtgcgtgctgccctgaaggctttcagtagaagggtcctgtggggctgtgggctggagcagggaagcccacccaggcaggaggggaagagggagatctggaagatggatcgccaatagccagcaccagcgcccaggagtccctccttcctgggtgcctctgtgccggaggcccgagtcccctgaacacctgcaggaggccaggcatcgcccacagccctgccccctggcctcttggcaggaaaaagaatgagaagctggagctgctggtgggctgcattgcagagctgcgggaggcagatgaggggctgctgagggccggtgagaatgacttcagcatcatgtactcaacccgcaagcggagtgctcagctgtggctgggcccagccgccttcatcaaccatggtgagggtcaggcaggtggatgggcaggacgggatagagccaggcagggctggaggggtgtagtgggagggttctgcgactgagctgccgagctcatctacctctcttctctctcctgccccaactggctccagactgcaaacccaactgcaaggtaaggccttgggactcgggaggagagggcacgcaggaagaaagggtgcctgtggcctggggaaa[132 bp omitted]tactaaaaacacaaaaaattagtcgggcgtggtggcgggcgcctgtagtctcagctacttgggaggctgaggcaggagaatggtgtgaacccgggag[138 bp omitted]ggcagagtgggtatttgctcacaaggctaccagaaaggaggaaggggttccagtttggccagcgttgcccggctgtttgtgcagttgcactggaaccctggttgccagctgctggccatctttcttctctgaaaaccgagctgggagctgtgccaatttgggcagggagtgtggcagggaggcagggccctgtggtgggagcccccggccttgcagggaacaacgcaggcagctgtggtggcaggagcagggaggccagagagccccaggggccaggactcaggatgctgtccagacatgcccaggagaggccgctggttgtcctgtagcccggaagcagaaggaatcaggagggttggctccagggcggcattgagggtgcaccctctggagcacagacctcgatggggcaccccgggaggcatgacaaagggatccagatttttggctccagagtcagaactgagttggggtcctggcgatgccacccctggcctttggtttttcatctcagatggggttggtgaggatctctggaactctgcgggctggtcaagtgtgccggagggttttggacagcgaatgcgtggccctggtctgacaccacacacagacgctgggggggatggaaacaaaaggcggcattcggagaggctctgcagggccagtgtgctccagccaccttgagcacacgagagggcggccagctctccagcgatctagaaccatctggcttcacagaagccatgctgggcatcgacggaggagtagaatttccctaggtgttaaaggaaatcaggggcaaaggggggcgtctagcaggacacggcacaccagagggctgggggtgcccagcgacggctttgatccggcagcaaggccttggggtccgggccagggagccatggaagctccccccagggtgtataatgggaagcttggtttttaggtcaccctggaggcccatgtgcaggaggcttggcaggaaggggagaggctgtaggcagggtggccacaaagaggtgatgaggggctgactccagtaggggtctcggggaggcgaggaggatgaggatgcgggaggtggcacactcagaaggcagtggccggttggtctgggggccgtcaggcaggcaggtggcgagggctactcccaggcaaatgtcaggcttgagtggatgggtagatggacagttgggtggacagtggtcatgccccctcctagacggggaacagggaggaaggcgcagctgtgtggggcttaggaggagcctgtggggcagctcctgggtgaatgatcccaaaggcagggccagagcacacacagattgggctgtggagtgaggcaggcctcagagaagcgggggcggcccgcagcaggcagagctcggacctcagctgccaaggcacagtctggcggggggcaggcagctcaggaggggatgggcttgggtgtggcagaggaggtggggcttggcacggggccacagaggctggagggagtggtcaccactgctggcactgcacgctgccagaaggtcaggttagatcatcgtcctgcagggaggggtggaaaccagccagtgggtggattgtccaggggctacaggcaaaggacaggccctcggcaaggcagccgcctcggaatgccacttttaggggctcagctgttgccccattccaggagaggacgctccgggccagggtgcccggccaggtgtggggagtgggtgagccctcccctgtgccctgggccagggcgctgagtgggcttggccctcagtttgtgcctgcagatgggaacgcagcctgcgtgaaggtgctccgggacattgagcctggggacgaggtgacatgcttctacggcgagggcttcttcggcgagaagaatgagcactgtgaatgccacacctgtgagaggtgggaccgggcgagaggcggctgggttcgggtcgtctgggcttcttgagcccagaaacgcaccctcgggacccatccctgagtgtgtccaaccccagcctctcatctcccttccacccggcctcatctccccttcacccggtctcccaggaaaggtgaaggagctttccgaaccaggcctagggagcccgcgttgccaccacggcccctggacaagtaccagctgcgtgagaccaagcggcggctgcagcaaggcctggacagtggcagccgacagggcctgctgggccctcgggcctgcgtgcacccatccccgctgcgccgggacccattctgcggtgagcacccctccctgccatcccagcagcccctcccctgtctgctcctggtcatctgtctcctttcttctgagctctctgcctagcctggaaccctccctcccaccctcagtcgctggcaggcctcgctgttgagcagttcggccgcatcattcctctggggagcgcagggcagggctgcctccttgtccagaggaggaccggcccagcttgcactgacttcacctctcctttgttcctcctctccctgccacctgggccttcacagccgcctgccagcccctgcgcctgccagcctgcagcgcccgcccagacacctcacccctctggctccagtggctgcctcagccccagccccgagtgcggccccggaagcgccgacgcccccggccccggagggccccagtgctctccacccaccacgctgcccgcgtctccctgcaccgatggggaggctgtggcccccactgccgcctgcgaggagaggccctggtggccctgggccagcccccccacgcccgctgggcccctcagcaggactggcactgggcccggcgctatgggctgccttacgtggtgcgtgtggaccttcgtcgcctggccccagccccaccagctaccccagcccctgctgggaccccaggccccatcctgatcccgaagcaggccctcgccttcgcccccttctccccacccaagcgcctacggctggtggtcagccacggctccatcgacctggatgtcggcggtgaagagctgtgacaggccggacggggaggcccagcagggagagagggtctctctcctagctgctacccaggacctccagaaggagcccttggacctctgggagggagctgacccttgactccagcatagctctgaccctggaatggggttggtttggacacccccagggatctgagccctgaccctttgtgactgctgacccctgagccacccccactcccacagggagccccggccatttgctgccctccccacccctgccccagcctcaggactgcaggagccatccgcccccctcagccccttcctccccagggagcaaagccataaggggcaggggccaccccacggcatctccccagaagtacaggcctcaggaggaggtggaactgatgtagggggtggcactccccagagactgccctcacgaggggactgggttcgctctcagctctgcagctgtctgcggtggggggaaggttggggggtgtctggaggcatgttcccctcaccaccccccgtgggtctcagggaggccgggtgtgacctcatctttctcatggtgctatcctggtgctattggggtggggagctccctcccctcccccacaccagaaaggggtatgttgggggcttggaagcacttgaactttttattttattaaaaccttgttataagcagcacccttggcggttttttgttttggcttatgttttgaagggatgtgaggagggtgagaccctcagctgtgctgatgagagggggaggaggcaacacaggccttcagccctgagagctgtcgggagagggatttgggagcgtgatggactaggggactgaggctggagccccatccccactcaggctgtgcttgtaaaaatgccttgagacccatactctcctaggagtgggtcctcccattttccaggcgaggtcaacatcgtttagcaagcagagtgacttgccaaggccacgtggggacttgagggcccttctcccttctcgcgcttctcaatgagatgcccctcccacatctcactccaaacggagagagactgctgggggcctggctgagtgagggtgtgggggctgcccaggacaccagagccgagcctgggggaggcggcgctgacaggaccttcctcagctgtggcatcttgggctttgccgtgtgtgagaccaggaagatgaatcttgtttcttcaggtccgctccaggatctggattttgccagggcgtcttagctctgcctgctgtctcgttttgcaaaaggaaataacagcggctgactgtgagcaatccctgatcccaggtacctccagcttctcccagatacttttctcactgggccaccgagcccgtctcacttgggcagctacaggtcacctgctggctccaggccccccatgtgcgcctccgcatctgccagccttgaacaagcttactgtggaggtggacgaggccaggctgcaggtatcaggaagctctccttggccctggtggagagggagcaacaggggagcagtggccacagcgagacccatatgagcacctcagcggtggccctgggaggcggggacaagggggcagttgagaacgggtcaaaccttgtttactttaaaactcattagatacgttggataatatggcctgttctatttcttttgcagggagaaaattcctcttataatgcaaatcctgctaagccctgtttgttttctttctcatgttaaaaataaggacggagagagctccaggccatcaaacagcagagagatggctccactgctagtccccaaggatttgtctctgagtgaactgaagccatgctgttcgtttctttccttttttttttttttttttttttgagacagggtctgtggcccaggctggagtgcagtggcgccatctcggctcactgcaacctccacctcctggattgaagcaattctcctgcctcagcctcctgagtagctgggaccataggcacacgccaccccgtcaaactaattttaaaatctttttgtagcaattgtgtctcactgtgttgctaaggctagtctcgaactcctgagctcaagcgatcctcctgcctctgcctcccaaagtgctaggatgacaggtgtgagccaccgcgcccggccttttgtttctgaaattcaggtgctgttgccacagctcttagacaaagagggcagcggagcagggagtctcagctgaggactcatgggtggacattggaatttccaggaaccttctgaaatcttttaaatgttgagagtatatatttacatgcacattttttatagggggttcagagcgttcatcacattctcacaagtttctgtatccgcctctcctctgcccc[136 bp omitted]cacggagaaaccccgtctctactaaaaatacaaaataagctgggcgtggtggtgcatgcctgtaatcccagctactcgggaggctgaggcaggagaatcacttgaacccgggaggcagaggttgcagtgagctgagatcgcatcattgtactccagcctgggtgacaggagcgaaactctgtctcaaaaaaaataaaaataaaaataaaaatggtgagggcgttagaaactggcgatcagggtttcctggcctccgcactgctgccatgctgagctggtgtttctaggcagggcctgtcccatgcattgcaggatgttgagcggcttctctggtctccacccactcgatgccaggagcatgcctctgccccaaccaaaaatgtctccagaccttgcctgatgtccccatggcggccaaagtcagcttctggcttgagctgggcagcaccgggtggtgggggaggggagacaccaggcccatagtgaccgaccattccctgtccttgtcgcagcatggagggtcaggacagccttagggacgtgggcgctctcagtcatctcgcccatacagacaggagctggctggggagggcaggtgtgtctgcttggcgtccctcagctgcaggggaccctggcttccacgaagttggaggcgttcatgctggcacttcccagctggcaggacctgggggacatcctggtggagcaggggcctggggtcatgagttcaccaaggtagctcaaggacaggaagaaacggtggtggcagagggtcctctggtcgaagcctgggcctgagaaccccatcatacacgtggagaccagagcaagggaaacaaggaactcgaaggctggtggctgtaggtgaaggtggaaagaagtttagtgaaacaggaaatacaaccagcactgacctgggtgtgtggcactagaactgctctcagcctttggcaggcaggcagggccctggccaaggactccccaccctgaccccgtgtctccctgtgggggcactctggccctttatgctgcaagctagtaaccagatgcctccaagagctccaggactggtttatggggtcatccctgggctgtctgtccggtcaatcagtctcactgtccagcacaatatggggcaccagaactgggccgacatgctgattcgagtgactcagattgtctctatggctagagaccccacacactgtgaagaggggggccagacactgttctaactgctttatatgttttcacatcgccgtcctccccacaaccctaggaagtgaggtgtcattattatgtcattgttaccatatttcagatgaaaaggccacagcgcagaggggctagggaacttgtcccaggccacatggttagtagcttcagggcctagattgaactcattctcagaaccattcgggctctgccaccttcaggatgggaaagggggaaacccagagagaggaggcgaagctgcggcccctaggagccaggggacagtgagcaggggaggcagcgcaggtggccttcaggatccgtggtctggaggccgggaggacggagcaggttctgagggaagaaccgcagagggaggggaaagtggatgatggaaggattgaagagatggggctggaggaggagaaagaagaggaaaaggagtagagaaagaaggcgggaggaggatgttgagcgaacaaggatgcaggtgttctgggtgggggcaggaataagtagagtggccttggttttctctgacctgggaggttgctgagactgtgaggctggcattaggggtctcaggaggcggctactggacaccagggaaagccagccagagcacctggaggaggtgttcggagtttgcacaggtgatggtccaccaggctggaggccaggccgggcaggtctgcccctgcccctggctcaggcatcagtggggcagtggcggctgcagagggggtcgggagtgtgagaatgtgctgagatgaggtctggaggcagtgaagataggatgatgggaggaggaggaaggaggaaggctggccaacagggcaaaaatgggttctagacacggctctggggaggtcaggaggctgctgtggctgcacaggtgtggcaccctgtgcttgggatgttacctgggtgacctcaccaacttagctccattctgtgactcagagaggggtcctgcccccgtggttctgccagcgcctctgtgcattcgtcaaggctctggggacgttgcatgaacaggaagccctcctgtagttgagtccacaccctgtgccctcaccccattcttgggttgtggtcagagacggagccaggagaccaagatctcagaggtggcgtcatcctgggggatggctcatctagggtgtgtcctgggcagcatggagggcaggtgatggacaggtcatcatggggcagggagcaggatggagtcagccccctgagctcacccagccctacctcctctgataatggggccctgagccatcttggtttgccttggggaacctcgggctcacacaggtcaagaagcttgtctagggtcaccctgcaagttgtcatgattagttgtagtcacctttgaaccctggggttgaacagggcctcataggaccgcttcagtcagaggatggggcttccccctcctaggagcccctctggaaggctgatagctcagggagtacccgttgggaaaaccagcaccccaggctgactggtctcacggctccctcagcaggaccaggctggaaccctagggctttgtcaagcggcactccttggcctggggagaggcaagacttcaaagggcgtctggaaccggaatgcggttccgtgttactgccgggatggggaaggagtaaagaatgattccgagggagctctgagcgtcctctgggtgctggcagtctggcgggggtcacaggagaaattgcggcgatgtgtgcggtgggagagactgacagcggcctctgcggggtgggggtgcggggtgagcctgatgcattggagaactgagcaggctgctacgcctggctgtgggtgcgggtgccgaaagcgtggacaccaggggattctgttggaaataagctggctcacatgatggggatctcgatgttctgggaggggaaatgagccaggtgggagcggggtcgtgatggagagtggtggagagcccagagagtgggggaggaagggatggagtcagcgctgggtggtacaaagaagacccctcaggacccgagatgggatggatcaggggtgggatggggaaggagcctggggagatggtccaggcaggaggggagtagggaaaggactgaggtgagaggtaggtgtggtgattggaggcaggagcaccttggagccatctgggtgggacagtgttgagaactggggaccctgggctggctcgtagctgtcaacgcgaggcatctacctgctggaatggagagggagaagggggacgggaggcattcggcttcctgtcttagggccttgactgcctgctgctacctgatggagcagcagtcccccacctgccccttatcggaaaaagcagcgttagcccggacacaggcacacggaggatccccaccaccaccacgacgcatcgctggctgggcattaagaagaaacatcagcaacagcataccattattcgtggcttagacactgggaggtaggggtggataaccgagacccggggctccgcgagacaaaaagatgcaggatcactgcatcttcagaggaagccgcgctggggcagtcagattttgccggcgaaaatcccgttcttgatctgctcgttccagctctccacctgggaagcagaaaggcagggagcgggacgccggctcagcctcggccgagccctgcacacgcctggcccggcgccccctctgccgactcacccagctgatggggcacagcgagtggtacacgcggaaatagtactcgcagggctgcgtgctcttcccgcggcgggtcctggtcttgaggcagcggtggtagtctgtggcgggcgggggtcacgcggcaagccacgcccattccaggacaggacccgcccctccactgctcgggccctcccagttcttcgctgcttcgtcccgcctccctctcccctggaggcctccgtcccgcccctcccagccaggccccgacccctacctccctcacactgctcctcctacccagaccctgcccctacctacctcgccccgcaccttcacgactcggccccgcaccttccagatcaggcctcgcccctaccaacctcgccccgcccctccaggctcagccccgccttttctcgaccaggccccgcccccaccaacccggccccgcccggcctcccaccctaacggtctccgcgggacttagggtgggagtgcccctccctgccgtcccttgtcacaccctgctcctcccataacctggctgagcaggtctcacccaggaagttctggtagcagttacggatctggttctggctggggaagcgcgggtcgaagggcggcgtcgaccatttccccttggggggctcctgggcttccacatccaacatccacgaaggaggcaactcctgcgagacgggacgggacggggactccgtggggccgagggggcgccctcgctccgacccgtctccccatcctgacccccgcccctgaaccccacccgtcgtgccctcaccagcctgacgttggcggccactggatctgctgtgggatggtcccggggtgccgctcgcttctgagtccgcggggtgcggtcccacccgggtcaggagaaacgcaccccgcggccggattggctaggacgcccgagccccagccaatgggagccgtcgtgcaccgcggggctggtaggggcgcccccaccccaccccttgctcccccgacgccccctcgggggcctgcgcgtgcacacaggcaccgaggtgcgactcgctgagtctcaggctcaagctttaatctctgcgaagttgggcggctccacgggctcgcccccgcccccccccgccccccaatatataaaggcatatccatagttctggtatctaccagagggggcaaatccccccaagcggctttcaacattccgcttcctacagtcggtgcgcacagaaccctcggggcctgtggggttaagaggaaagagcagcggtggggtccgggctcctgggaacccccccgcccccctcgtcctcccccctccgttacccgccccccccaccctcctccctcgcccccctccccccgcccccaggtctaaggcagatctccagggtcttaaagggtacctggcagcgctgggctcctctggacagtttccaactgaggttaagcccccgcatccggccactcggagtgctgggagtgctgcaggctgcagggagaaagcaagccagagagagctttgggggacagggtagggagagaggggtacccagggctttaagagctgcagatgcctggcttaggagagcgtcccccagggcgggtcttgctgtgtgtttggctcactgttgtatctgcctggggcagagtctggcagtagtaaatgcacaataaatccgaggcggaatcaatgagtcttggctctaggggcagacaagtaactggaatctgggcaggtggtttcacctctagatccctgctaagcttctctccctcctgcctggttaatatcaggcctgactcaggattgtttacactgacagccaaatgtacgaattaagaatcccggccaggtgcggtggctcatgcctgtaatcctagcattttgtggggcagaggcgggaggattgcttgagtccaggagtctgagactagcctggacaacatggtgaaaccccatctctacaaaaaataccaaaattagccaggcgtgttggtgcgtgcctgtggttccagctactgaggaggctgaggcaggagaatcacctgagcctgggtagcttgaggctgcagtgagctgtgatggcatcactgcacttcagtctgggcaacatgtgagacctcttttctacaaaaaaatcaaaaacttggctgggcttttggaggctgaggcaggaggatcacttgagcccaggaagataaaggctgccatgagccacgatcacaccgctgcactctagcctggcaatagagctcacccctgtaatcccagcactttgggaagccggatggatcacctgaggtcaggagtttgagactagcctggccaacatggcgaaaccccatctctaaaaaaaaaaaagaaaagaaaagaaacagggtgtcactctattgcccaggctgcagtgcagtggcacgatggtgggtcactgcagcctcgacttcccagttcaaccagtcctcacatctcagcctccagagtagctgggaccacaggcacatggcaccatgcctagttaactttttttttttttgagacggagtctcgctctgttgcccaggctggagtgcagtggcacgatctcagctcactgcaacccgtcgccatgcccggctaatttttgtatatttagtagagatggggttt[131 bp omitted]actcttttgcccaaacttgtcaccattttttaatgtaccccttaaagtggcattcggcacattcacaatgtcatgcaaccacctctacctagttccagggcatttgtatcacccacaaagaaacctccaacctggctgggcacggtggctcacgtctgtaatcccaacacttttgggaggccgaggtgggcagatcacctgaggtcaggagttcgagaccagcctggccaacatggtgaaactccgtctccactaaaaatacaaaaatcagccgggcgtggtggtgagcacctataatcccagctactcggctcctcaagaggctgacaggagaattgcttgaacccaggaggcagaggttgcagtgagctgagatcgcgccactgcactctagcctgggcgacagagcaagactccgtcagaaaagagaagaggaagggaggggagaggacctccaacccatgagtagtcactcccgcttcctccacactagacccctggcctccaacgattcactttctgtctctacgggtcagcctgttatggacatttcatggaaatggggtctttgtggccttttctgtcctccaggtgcccactcttgcccccctacatcctccatgccccagccagaggcagcctcttcacacataaatccgtctccatcattcttctgctccaaaccctccagctcgctcagagtcagagccaaagtccctaaaattgtctgcaaagtcctccatgatgggcgcccccctgctgcacctctgaccgcatttcccaccccgggatccccgtggtccagcacattacaaacactcctgcctcagggactgcagtggctgttccttccgctgggatgctttccccccagatgtcctcatggcttcctccgtcctctcctccaggtcttgacacaaacaaccccagctccgtgagggctccctagagcacctgggctgtggtgggggctgtcctgtgcactgtaggttgctcagcagcatccctggtctctacctgctagaagccaggagcacatcccaccaccaccagccccatggtcggacactgtatccccactgcctagaacaatgcct[154 bp omitted]tctactaaaaatacaaaaattagctgggcgtggtggcacacgcctgtaatcccagctactcaggatgctgaggcaggagaattgcttgaacccaggaggcggaggttgcagtgagccaagatcataccaccgcactccagcctgggtgacagagtgagaccctgtcaaaaaaaaaaaaaaaagtgaaaggaaagagtgatcatctctgtctcataaacagcagagctcacagtaaataatagctgctaacccccgctacctgggcagaaggttcaagacgcccgattcctcctgtatctcctctgccttggtggccgtgttcctcacagtttcaagttctaagagcatgggcaaaagaatttctgaagacgaccccacagtggccagggggtgctgggctggcatcctcatgggctcctgcgacaccctcttgggctgctgggacgccctggctgtggcctccatctttgagatgagggtctccgagaggggcgatggccgtaagtcctcccacggtgaggcggtcagggggataggcgcctgggagattccttccctcttcagactggcagaggtgggcttggagcgaaagggcaccttgggtggccccttggggtcccagggtggctccttcatctcgccccatggctgctccttcatctcgccccatggccgcttgccctccttcacccaggtgtgcgactctggctgctctctgaccaccactggcttcccctccagtaaggacagctggccggggcgggagggcactgaagccatcattgacgtggccgacgcctgcggagtcgccaagagccaggagggaagtgagaccaaagcggatttcgagggctgctctttggagttggccgtgatcatgagcttggtgagggtgagcgcttccacagagaagggcctgctgtgctcctgggaggggccctcgacggccagttccttggccttgacccatctcttccgctgctccaactccttggatctcacgccaggcaggtccggggacctctcttcaagcttcgcccagtgggcccagtcctccaacttcccctggcccctgaaggcctccagggtcacctccttggtttggctaatcaggatgtccttggactccttcttggtcacggtgaagggcgactccggggacttggcctgagtcgtcatctccaccacgtctgtctcctgggtgcgcaccgtcaccaccggctccggtttccctccagactggcttctctccagcacggctcttccaggaattcctgttggcaacacgtcaaaatcgccagggagcttcccccgtgaggcaggcgggctcagcgccatctggtattcggtaggtgaggttggcagagccttctgggatggggcagggaggagtagagatttcttctttggagcagtgggggacacagccttctggggaatggtaggtacagatggggccttctgagatgggggtggggtcttctggggtggggcaggtacggctgaggcctttcggggagaagctgacgcagctgaggccttccgggatggagcaggtatggctggggccttctgggatggagcaggtacggctggggccttctgggatggagcaggtacagctggggccttccggggaggagctgacgcagctggggccttctggggaggagccaatccaggtgggggtttccacgatgaagcaggtacagctgggagcttctgggactggtcaacaaggaacggtgccttacaagatgtgacaaggccagatggggccttctggcagggtggtggccccggcccctggtgggagcccataggcccggccttttccctgcccctggggatggaagagtagggtgtggagaggcaggcagccgggggatagggagccagaccggaggcagcagacgacaaagtgctgcccccagagtccatgaggtcttccgtgtcctgatgccacaggcacgggtccagggagctgcaggagcccagaaagaagccatcagggctgtcagctgagacacagtgtgaagggctctcaaccacatgtccctggcctgtggcttcatcagatgcagatgtgcaggcctgtaggtggacagaggggagaggatacatggtcaggatgcatggagaccccagacccgggagggcagacccctgctccctcctccctcagactcaggagtccaggccccagcccctcctccctcagactcaggagtccaggcccccagcccctcctccctcagacccaggagtccaggcccccagcccctcctccctcagactcaggagtccaggccccagctcctcctccctcagactcaggagtccaggcccccagcccctcctccctcagactcaggagtccaggccccagctcctcctccctcagactcaggagtccaggccccagctcctcctccctcagacccaggagtccagacccccagcccctcctccctcagactgaggagtccaggccccagtctctcctccctcagactcaggagtccaggccccagctcctcctccctcagactcaggagtccaggcccccagcccctcctccctcagatctaggagtccaggccccccacccctcctccctcagacacagaagtccaggccgcagttcctcctccctcagacccaggagtccaggccccccacccctcctccctcagacccaggagtccaggtcccagcctctcctccctcagacccaggagtccaggcctccagcccctcctccctcagctctggggcctgggccctgccccgggtataaggctggcctttggagaggactgtgtctggttggcggtgctggaaatgatgctgaagatggtccaggtggtgatgctggtcttctctggatgggggagccgtctgagccctttggggcaggaaccagagccacacactgtggcaaggggtggggtgggttgatcttaccaggcaagcggatttgggtgtgagttctgtcggggcgggggtctgagtgggacctgcaggagcaataccgtgggactttggtggcatctgggctggggtctcccaccttctcccacccacccaccggcaacaagaccccacgcccacttcttttctgcaggtttcttcctgacgtcagcatgctccagctgcgaccagatgaggggcacagagtcgcccacggcctgagacttgaaactgcgcttgagcgcctggagtgggtgaggaagggacggttagacaggggcagccccttgggcccacaccaccccgccggctcaccttggccttcctctgtctctgagcagccaccgtcttatgcggaaagttgcgctcagcaaccctgactgggaagagaggagacatcctgggtcagggaccccaggggagggcacgaggacctaccccaggagcttgtggagggccccaccaaggaagggggaagagccaaagggtgcagctctgtccctgcgacggggagaacccagaggtcctgacaaacagcagggcctgctcacctgcatgtctgctgatgggctggtcctgcagagatagagggaggcaggaggggcccgggcttccacatctccataacctacccagcgagaggcctaggccccctcctgctcccaggacctgacgatccagctcctcctgcctcagacccaggagtccaggcccccagccgctcctccgtcagacccaggagtccaggcccccagtccctcctccctcagacccaggagtccagggccccagcctctcctcccttgactcaggggtccaggcctcagttcctcctccctcagacccaggagtccccagcccctcctccctcagacccaggagttcagactgccagccctccaccctcagacccaggagtccagaccccacagcccctcctccctcagacccaggagtcccccagcccctcctccctcagacccaggagagttcagactgccagcccttcaccctcagacccaggagtccagggcccttagctcctccgtcagacccaggagtccaggcccccagtccctcctccctcagacccaggagtccagggcccttagctcctccctagacccaggagtccaggaccccaggcccttcttccctcgactcaggggtccaggcccccagctcctcctccctcagacccaggagtccaggcccccagcatctcctccctcgactcaggggtccaggcccccagcccctcctccctctactcaggggtccaggcccccggcctagactttgggctcttggtcgcagtcccctctggatctggccggagggttcctggggcctgccatgccctggtctgtggagctgggatcccacctgcaggtgccaggtggaggcaggcgcttcggccagcggcatatccaggggggccgtgcgcgtggtcctgggggtccaggtgggagccggctcctgaagcaggttgatgaggcggacccagcagtggaacaggaagcccacctcgttgtcaggggcgtccagggccaggtagtactggcggcccgagaccaggcgcagcttcaggcgccaggcagagaggtcatggacgcagaggtggacgaggtccagggggatcatcctgggagagggagaggggagcgtctagagcaggaggggtggagggggcggccgaggggttgggggatgcggcacctggtcagcacgaggccggagcagtccctgtcctcggcgggctggccgatcagcaagatgtcaggcaacaccaggcctggcagggaggcggccacgcccatggccagccggttggttctgtgattcacgaacactgggcccccttgatgggtcacctggggcagccagggagagggggctgggaccactccttcctccagcagccacagcctgagcctccctcctgatcgtcccccacacagtgactgctaaatcccgttccctctcaagatcccccagcacggggggccttgcttcccctctgtccctctcagccccggggcactgggaactggagacctgaacaaagttactctcgaacatgggcagcggacggaggggcaggtactcgcccttctggagggtcttttgcagctcccccagaacagggacccacttcggggtgccctggagcggctcaaggcacctcctgtttcgaagccagatcatggtggctgtggtggatgggtactggtttagggacccagaacccaggcgtgcaggcctcccagccccggcccaccagccttgacccgtggggcttcacgggtgcctggagctcagcgttacagagcgtggagatgccccaggctgggagactcgggcctccgccatggccctgccagggtggacagcaggggtctgggggaggagcctctggtggaggggctttgtgacctcatcggacacacaggggcctcttccaggaactctccggggactgtgggctcccttctcctccagggatacagcctggagttttttgtttgtttgtttgttttttgttttttgagatggaatttcactcttgttgcccaggcagtgagcttagattgccacactgcactccagcctaggcaacagagcgagactccatcgcaaaaacaaacagccctatgcagtgcggggccccaggcgaggctcagaccctgcctccacggaggaggcacgatcacccagacagctctgtggaggcagggtctgagcctcgcctggggccccgcactgcctagggctgtttgtgatgtgatctcggctcaccgcaacccccgtctcctgggttcgagcgattctcctgcctcagccttccgagtagctggattgtatttttagtagagacagggtttctccatg[139 bp omitted]gggcccaggatgggcacctccaaccccagactcaaactagtgacgacacggggcccctggaagtctgtctgggttattgtaaagggaaaagtaactaaagcatttgaattatcatccctactctgccattgacccttctctaggccctgggtaagacccaaatccttactgaacctgtttctccatatctcatgtgtgtgcatgtggcgaggattcctcaacaccgacttgcaaagagagctttgggaaagagccagacacggcgcagaatcccacttccacctctccctagctgtgtgactttgtgcaacagagtccccactccttgtctgagactcagtttccctcgcctgtaaaacagggcgtattcaagagtccaggaggattgtgtaagtaaaaagcccacacttagtgcacagccctgacaggctcaatcagcggtcaactttgtcccctcctgagggcttatttttggagaggaggaggctgatattctgttattctaaaaatagtgtttattatttttaaaatgtgtcatgcaaaatacacagtcatggcagaaattctgtaaaatacagacaatcatacacattaaaagtcacccacaatcccacctctctcctttgacctggagacagtcattgtcaacattttggcgtatttccctttaggatttttgttttaatccatatatagaaagaaaaacacaaaattgggatcacagcatgcagtggttttgtagcctgctgtttcatgtcaggacatcattctttcttttttgagacagggttttgccatgtctcgcaggccggtctcgaactcttggacttcagtgatccactcgcttcgtcctcccaaagtgccaggattacaggcgtgagccaccatgcctggccaatgtcaggatatctttctatatcccaagcaagcctctctccttagcctccctgaatgacagtccctgctccgggcggctgggtggcgttctatccacagatgcaccatgttgcttaaccctcactgttggatatctagattgtttccagtttgctatggtgaacacagccataatgaaccatcttgaccttgcagctttgtcccatacgggtactgttgatcacagggtgacttgtggaacc[132 bp omitted]gaaaccctgtctctactaaaaatacaaaagaaataaataattagctgggcatggtggtgcacacctgtgatcccagctaatcgggaggctgaggcaggagaattgcttgaacccgggaggtggaggttgcagtgacctcagattgcctcactgcactccagcctaggcaacagagcgagactccatctcaaaaaacaaacaaaaggccctatgcagtgcggggccccaggcaaggctcagaccctgcctccacagagctgtctgggtgaccgacccatctcccagtcgctgccccgcccactcgggacctccacctgaatggaggtctcccctccacctgccctgccccagttacccaagcatccagccccagctctcagacaaatcgccctcaagtggatatgtatgacacatttaattccctgttctctgtctcacaaaggtttctcacatttttgtacaaaaacccaggcttccctttcccctccgtccccaccccaacatgaaaagtaattgcttaaataaataatatatgttcctgcccaggcctagatggggaagagccagggcagaagtctgtggacagacttcttggagacccaagaatccgggaccccagtcccctcctcctcggggacccaggagtccacctgcctcccacccctgctcctgaaataaataagtataaataaggcacagatgccccccaggcctcacggaaggactgtctctaactagggggagataatggcggggggatcacctggctgtttcgcccccagtactgaaataaataaataaataagatctggctttggaaggacggtggtggctttgggccccgggtcacagccgagtcttcagcagcagcagtcccctcacggcccagtcaagtgtcaggtgcagcccccccaggatggcgtgggcggccctgatgcccccccaggctgaggaggggggcgccagcgggggcgccggcgggtccgggggtggctggggcagggccaggcgggacatctgtggggagaggagagaggtgagtcacaggtagggggtgcagcgggggtgcagggcaggggtgctgtggagctgcagctgaatcggggctgcatattcacagggggactgtggcgcgtggggtgaagtgtttaggccgggagctcttcaggctgtggggttccgaaaatggaggctggagtcaggacgggcttccagagctgagtgtgggggttgggggtgaagtctgtggagtcagggctggcatctcggttctaggtgagggatcgggcctgggactgttagagtcgccggggctggaatctcagagctgggtttttgttgttgtggctgctgttagaacaattaagaagccaggcgcgggggctcacgcctgttatcccagcgctttgggaggccgaggcgggcggatggcctgagctcaggagtttgtgaccagcctgggcaacacggtgaaaccctgtgtctactaaaatacaaaaaaattatccgggtgtggcagtgtgcacctgaagtcccagctactcaggaggctgaggcaggagaatcgcttgagcccaggaggcggaggttccagcgagccgaaatggcaccattgcactctagcctgggcaacagagcgcgagactctgtctccaaaaaataataataataataataattaagaaacagagtcttgctatgctgcccaggctgtctcaaactcatggcctcaagaggtccttctgccttggcctcccctgccttgggattacaggagtgagccactgctccccaccagagctggggttttacagacagtatctgaggtctgtgggctcgagtctagggtcaggccctggatctcaaggctgaagtcttagagatggggtctctgggttcaagttcaggaactcatgggtgagggctggagtctcagagctagaagttggaatttgagatccagggtctttggagttaggcccaagaaccagggtttgaagtcttctggtctcagggctttgggcctggctttggaagtgagggtcttggagtcgtacaggcgcaggctcaggatctgaggtgtcagggttttcgatgttgggagtgagacatagggcctcagggctcggggtctaggtcctggaggtcttgggtttgtacagccagggtcccaaggctggctttgggtcaaggtcttgtatcttagggcctgggatctttaagatgtcaggatctcagggctggggcctggggtctcagggtctggaggtccatggttttcttttccttctttttttttttttttttttttttgagagagagggagttttgctcttgttgcccaggctggagtgtaatggtgcgatctcggctcactgcaacctccgcctcccaggttcaagcgattctcctgcctcagcctcccaagtagctgggattacaggcatgcaccaccacgcctggctaattttgtatttttagtagagacagggtttc[143 bp omitted]gtcttgaggtgaggatttgaattctcaaggctttgggcttcaggatggggtcttgggtcttaggggctgggatctggggactttgaggtcatggatgatggagtctcagggtcttgggtgagaatttgaagtttctgggcaggatttgggggtctagggcctcagggtctcagggccacaggatcttgggactgcagggtcagggtctcagagcaggactgttagggtcagggtctcagagcggggctgttacggtgtcagggtctcagagcgggctgttagggtgtcagggtctcagagcggggctgttgcactcgggtctggggtctcaggcttcaaggactcaggccacaggattttggggccaggggtgggggtctggggtgtcaggtcttggggccaggacataccaggagctgcagccggcgcagcagccggtccagtcgggcctgcagggtgcccagctcgggctccagggtcttcagggaagagccacctgcccggcgcagccactgcacgtgccgcaggtaggacagtaggtccgctcgcagccttgtcagcacacctgggagctggggatagagccgggacatcagagaacacccgaccagtgcccctcatcctccccgcccccttcactgcctgcctcccaccttgtccccagcccactcccttgcccttacctgtagagctcccagtgcccccgcactcatggccagggtgggcagggaatccaggttgtggtccccgtcagctgggaatttgtccctctggcagggaaaaaagctgtgaggtggcccctgcccagcctcggggctccctccatcccccacgccaggcccccaactcttcccctccctcactctgccacctgagagcccagaacccctccaagtggctgcccgcagactcctctccgttcctctctgcctctcactcctgtgctggccccagcccagtctctcctaccagctgtgcagccagctgccgcgtgtccgccaggagagagcgggtcaggagcacggtgctgtccagctcggcccgagggtctggggaaactcgaggggggccaggtggtggcccaggggcgacagctgtatctggccacaggctcagcacgaccaggaccaggcggcaaacacctgggggcaggataaggcagagagctcaggctggactccgggtctgagagaggagggcctgggcctggactcccgggtctgagggaggaggaactggggtctggactcctcctgggtctgagggaggagaggctgggggcctggactcctaggtctgagggaggaaggcctggggtctggactcctgggtctcggggaggagggtctggggcctggactcccggccttagggaggatggagctggaggtcttaagtcccagggtggaacgcccgcgggcaggtcgcagggccaggcgggcttccctctccctccctggctctggctgccccgcccgtcggagcagacgcggcccggggcgggtagacgggccgggcgtctcccgtccgcccccggacgccggaatctgggccccggggcggggcatggtgggggaggcacaggccagaacctgccccctccccgggccgcgggagcccgagctggctgggagcaggggaaggagccagaagccaggacggagcccgggagacacggacctctcccacgggagaccccttagacgccctcccaggagccccgccgggtgggcggcagaagcccgggccgcagcgcacctgggcggagaggggcagagccatgggcccggccgggccgcgggagcgggagagctggcggcggggggcgcggggggcgcggggggcgcgggggtccggagctcgctccccgcagcccaccccggccgccccgcccacccggccacccgccagccaatcagcgctccccggccgcccgcgcctcgcacacccccagcccgccccccgggcccgccagccgtcggtctgtccgcgcctccgtcggccgcatctgcccggctctccccgctttccccccgcgcccagtctctctcctccccccggctggggtcgctactccctggcttgctccgctctccgcggaccctgcctcagtttccctccggagcctctctgccggaatcccagggagtctcccggtccccgcgggctccctggggcctgggtcgatgggggtcacctccctcccggcaccagtccctgcgtccctgcccctgctcggtctccgcgtctcgctccctctcggggccctgtctggcccgtccctcctgcggcgcctctgattggctgcctccatccgctcctgtctgtgtctctctctgcccatctcctccgccgcctcctgtctccgaagctgctctcctccccggctgcctgtctccgggtccctctctgtgcgactcagcggggtctgctcccacccccgccgtgggtccctctcctccctgcctccctgtcccctccaccctccccatgaaccaacttacagttcatgtccccacagggccaggggttccccagggcagggggcagggagccgggggcctttaacccttccctgtccgctgccgggggagccccgagggtcagctgggccgcggcctggggaggggaggcatgtgccctgagcagcagggccgcggcagtgagggagtgtggacgcctggggggttatatagggggctggggcgggcgggcggggggcaggcggcaggggagggcggcctgacacatcctgactcaccctccctgcctgccttttccattcagacggagcggctgccttgcagggctcacgccgccgcgctcggaggagggcacggaaggaaaagttggaaaagttgaaaagggaaaggggggggtggtcggagaggggctggtgaggtcattggcgtcccctccctccacctccacgggccggagcagacactcaggctcaagcgctggggcccgactgtgggtgggggtccggctggaccaggactagcagagagagatggggaggcaggaggacggaaaggcagagaaaggccggacggagggacaagacaggggcctggagaggtggaggcaggaggaagagggagtggaagggaaggagagagagagagacacacacacacacagagtgaaggacagactgagacagagacagggagatggagatccacagagatggaggcagccagagagacacaccagagaagcaaagaggatcagaggggcagccctggagacagagggagaggttctgggagtcagagatcagagagcgggaggaagacagcaggagggacttggggagacccagggagaccccgaggggaaaggaacagagacaccaagactctgagacagaggatgccgcagctgaagaaaggcaccaggcaaacagagacacggggcagagtgacagggacggagaggccccagggacagaaaaggggagacagagatattagaaagacagagacgctgagatgttggggactcagcaatgggggcagagagtaaaagcctttctcattttttgtttgttttttgtttgtttgttttttggtactgagtctcactctgtcacccaggctggagtgcaatggcgcgatcaatggcacaatctcagctcactgcaacctccacctcccgggttcaagcgattctcctgcctcagcctcccaagtagctgggattacaggtgtgcgccaccacacccggctaattttgtatttttagtagagacggggtcttaccatgttggccaggctggtctcgaactcctgacttcgtgatccgcctgcctcggcctcccaaagtgctgggatgacaggtgtgagctaccgtgcctggcctcgtttttggtttttttgagacagagtctcgctgtgtcacccaggctggggtgcagtggtgtgatctcagctcactgtaacctccgcctcccaggttcaagtgattctcatgcctcagcctcctgagtagctgggattacaggcacccgccaccatgcctggctattttttgtatttttagtagagatagggttttgccatgttgcccaggctggtctcaaactcctgagctcaggtcatcctcccgcctcagcctcccaaagtggtgggaatacaggtgtgaaccaccacgcctggccttttgaaaagcctttctcaaagaggcaggtggagacaggaaggaggaggagagacggagactgaggaccaagaggcgctgagacactccatagaggcaagacctccatgtgcgactctccccctctgtgcctcagtttcctcatctgtgaaggggggttaatgatgcaccctcatccgcctaaatgccacgatgaggataaagcgagctcattcacgtgaagcacaaagtcagtgctgaccatccttattcccctcgttaacttttctgaacacatcagggacacagagaaaaagatgtcgccttcgagagagatggggcaggagcaagatggggtgaagacgggacagtggggacacggagacagtggccagaaccaccggggccagagccctggacgtcaccgcacagaggtggaggcaggagaggagtgcaggggggaggggacccacaggccaggggggaggcagcgacgcctacccaggctcacagtgggccagccccaggcatgggggcagaggagacccgggattcaccacagagcaagcgaggggcagaggtaccaagccatgtccccgagagcccccagacctagatggcagggaaggacaggatgggactgagagcgcggaggtggtgggggctctgaggctctgtgcagaccccctcgtgtcagcctccgagactgccgggctggttggaggcttccccttcccaatccagcaccactggaagggcaactgctcaggtccccaaggaggtgaggtcacagcccccccacggtgggacatgacctcatcgcctcaggtaagagctctctctccctctctctggtctgtcacagccacccctttcagggccccccaggggccttccccagcaccagctcctgctgggacccaggcctctgaccaccgggtctccgcccctcagggggcctgcttccggctgagtcagtgtggggggcccaaggctgcgtcagtgaggggagagctgacgtagccccccccagaccggcgggaccagccaaggtgactcaggccaccagcttgggggatggactagcccgagggtatgggggactggcctggggccagctggggagcaagaaaagggttctggtaatgccagccccgtccacctacagggaccagagcccaatcccccagcccctcctccctcagacccgggagtccaggcccccaaccccttccccttcagacccaggagtccaggtctccagctcctcctccctcagacccaggagtccaggccccagccattcctccctcagatccaggagtccaggcccccaggccctcctccctcagacccaggagtctagacccccagctcctcctccctcagacccaagagtctaggcccagcccctcctccctcagacccaggagtccaggcccccaacccctcctcctgcagacccgggagtccaggcccccagcccctcctccctcagacccgggagtccaggtccccaacccctcctccctcacacctgggagtccaggcccagcccctcctccctcagacccgggagtccaggcccagcccctcctccttcagacacaggagttcaggcccagcccctcctccctcacacccaggagtccaggcccccaacccctcctccctcagacccaggagtccaggctcccaggccttcctccctcagacccaggagtccaggccctaaattctagttcaagaaaggtagaggaggatcttggggcccttctgcactttggggagcatgtgtggggaaggtaatgggtctgggacaaatctggggtcccagccgctgccagtttcctgtctcgtctgggtccccagccctgggttgtgggctcagactccgtccccgcagtgtggctgcaggaggtacaggtagatggggcgggtgcagagtgacggggctgggagtgactggcaactcctgggtctgcccaggccagggtgggacacattgggctacttctgtgcaaacaagagaaagagagagagagagagacagagcaagagatgaagatcggaaaagaaacccagaggcaggactggggagtcccaagaaaatgacagatgacagagacaaacagagctggagagacaggggcagcaaaggccccaggaggcagccagcgccacggaacccagtggaagctagagaccagcttggaggctcggaaacagactgggcagccagggcccaggccctggggtggtcacagacactgaggagaagcctcggggacatgggggatggccagggagtcctggctcccgcgcggccccggggggaagccgagccggcagggtgtgaggtcagcaggtcccaggctgtgtgtgtgtccgtctgtcagtccctggggggtcccgtctggcctctggggggtgacggggcaggccggccacagaggcagcccaaacctgtcattagcggtgagggccgtgacggcggggcccccccagtcccaagccgcggtccaaggccaggcggccccgccccccaccccctccttgatccctgaggaatcccgggaattgggaagtgggtccagatgatgttgacacaggaaacggtcagcagctgcccggcctcagccccacaacccctctgaccctcacccccggccccctgcagagccccctctaacctgtgtcatctctgacgaaggcagcccggggcccactcagtacccaccaggatgtttacaggagagatgggtaacacggggagtcaccccacggggcttcctgagaaatggggtctggctcctagaccatcctcccagactcacaagttcaggcccccagcccctcctccctcagacccaggagtccaggtccccaggcattcctccctcagacccaattctggctcccagccccatccttcagacctgggagtccagccctcagacctaggagtctgggaccccccagcccctcctccctcagacccaggagtccaggcccccagcccctcctccctcagacccaggagtccgggaccccccagctcctcctccctcagacccaggagtccaggcccccagcccctcctccctcagacccaggagtcccggacccggaccccccagctcctcctccctcagacccaggagtccaggcccccagcccctcctccctcagacccaggagtccgggaccccccagcccctcctccctcagacccaggagtccagggccccagcccctcctccctcagacccaggagtccaggctcccgccccttctccctcagacccaggagtctgggaacccccagcccctcctccctcagacccaggagtccaggcccccagcccctcctccctcagacccaggagtccaggctctagcccctcctccctcagacccgggagtccaggcccccagcccctcctccctcagacccaggagtccaggctccagccccttctccctctaatgcaggtgtctgagtttacaacccccttttccttcagatgcaggacttctagcccagagactgtcccagggagctaagactccctcctcactgtgctgcaaagctgaatggatgagttggggtgcactagggattatggttccaacccagccccccattccggtttcctcttcttggaagccaagttttctctcagtcactggggagtggtggggggaatcaatgtggaagcttcaggatctccgtttagccgactccctcccaccactccctaacctctgttcacagatggggaaacaaatccaggagggaaatgtgggctccctgtccaggagccaccattacagtctccgagcagctctggcccaccaggccctcaaactcagcaggggcccacatggcctgtccccttccctgtttgttttttttttcttttttcttttttttttttgacacagagtctcactccttcacccaggctagagtgcagtggcacgatctcgactcactgtaacctccactttctgggttcaagcaacctccacctcctgggttcaagcaatcctcctgcctcagcctcccgagtagctgggattacaggcaagtaatcaccacgcccagctgatttttgtatttttagtagggacggggcttccccatgttggccagtctggtctcgaactcctgacctcaggtgacccgcctgccttggcttcccaaagtgctggggttataggcgtgagccaccgcgcccagccctatcaccttccctgctaaacattccctagacagcaggcctggcagggctgagatgaaaagcctttctcaagacccctggaccaggagacccccggacttaggctccggccccttgtctcatccccctcccaggtcttctcattgcgggggggactttccctaacaatggggctcagtgaggcctctgtgtctcacagctccccttcccctggttgttaaggcgaaaaactccctagcaacggggtttcctgaaccttcgggccacccgaatccaccttctcaggtatcagtttccttaggaaagaaactccctagcaaagcctcccagttccccacccctcagggcgccccgggtgatatggagacacgccccagactcccacgcccttccagacttctctttcccaccataagtggccaaagaggctcttctaaacctgagacgcccccactcttccaccaggtccctaaagaatcaacaccctagaccaggcatggccaggctggtgtgaagcccttccacgtccgtagcacacccctgactccctagcaacagaactcacaatcctggggcctggcgggcaggcgggcggggccggttgctggggtgatgtcctgtaaggcctcttcccacagtggccccaggggtctggggaggtgacatgttgggctgtgggatcccagcgctgggcctgctcctgctgctgcagggctcggcaggtgaggggctggtgaggcgggggagctgaggagggacgcccggctccacacagccctaacactgccctttctctcgcagacggaaatggaatccagggattcttctacccatggagtgagcagccgctgaaatactgggtcacccagggaggggagcccagatcagacccctgaatctgagggaggaggagctggggcctggactcctggatctgagggaggacgggggggtctggactcctgggtctgagggaggaggggctgggggcctggatccctggatctgagggaggaggggctggggtcctggattccttggtctgagggaggagggctggacctggactcctgggtgtgagggaggaggggctggggcctggactcctgggtctgagggaggaggggctgggcctggactcctgggtctgaaggagggggctggggcctggactcctgggtctgagggaggaggggctgggcctggactcctgggtctgaaggagggggctggggcctggactcctgggtctgagggaggagggggtggagtctggacccctggggccctgcacagagtaagcaccaggaaggcagcctgggagcatggccttggaatctcgtgtatgaggccttcggagcggagcgctgtgatgaagcaagccactggtggttggtccccaggctgtgagggtgacatatgggaccgggagagctgtgggggccaggcggccatcgatagccccaacctctgcctgcgtctccggtgctgctaccgcaatggggtctgctaccaccagcgtccagacggtgagggctcctggccccaggtccctggggcgtgggtctggcggtcgggagccccgggtcttaaccctgcctcccttgtccagaaaacgtgcggaggaagcacatgtgggcgctggtctggacgtgcagcggcctcctcctcctgagctgcagcatctgcttgttctggcgagtgggcctgggatagggcgggcgcctgcacccccagggggagggtccggcggagggcgggggctgagccgtccgctccctgcaggtgggccaagcgccgggacgtgctgcatatgcccggtttcctggcgggtccgtgtgacatgtccaagtccgtctcgctgctctccaagcaccgagggaccaagaagacgccgtccacgggcagcgtgccagtcgccctgtccaaagagtccagggatgtggagggaggcaccgagggggaagggacggaggagggtgaggagacagagggcgaggaagaggaggattaggggagtccccgggggactgctcaatacagatacggtggacggacgtgtgttctcttctctgaaagccgtggggagcagggggcatggtgcacacagaggctggggtaacaggtgggggctggagggggcttggggatggaggcttagggggcgccaggctgtggtcgtgggggtgtgagctgagggggagcctggaatgagagagatctgggaggtaagtggggaggatccgagctgagggggatctgcgctcatgggggtgtcctgggctgtgatcatggggaccctggactgaggggatagaggtgtacgagtgctggagtgcgggtctgaaatgagggagttgggggtatgtgggggtggtggggtctgaggggtgcctggactgggtggggagaggggcacgccacagctgtggaaacgtgcccctcagtctcctacatggagtgccagtgactgacagtgccccccgcccccaccccagatgcacctagattaccatgggttgctctccaccaataactgagcatggcgaggcaaggggtgggggttccgggtacaggtgccttctcgaagggcaggggcctccctcatggacgatgacttcagctcccagctccccaggggccagtggcaattttcttggaggtgcggtacagtctaagactagtcctacccatccctccctccctctccctgcaccaagctaccctacaaaagtgtttccccaagacatatcttgcaagtccagtttgtctctgtgtctgcttctcagtgaacccaaactcacacagggatgttggggcttagagtggagggtctgggctaagatccttatcccccgccccctctctggccccctctgagaaggggccagcataaggctaggctcctatatccccagggctcctggtctccccagggcaggggcagcctcacctcaggtgtggccaggcccacctgggtgctagaaggaagcaagccacctcgtctccattcccaccccagcagggtccctctcccagacagacatgcagcactaaggcaaatctgctttttatccaagtgaggagggagggggtacagggagcgtccgtctggccacggatgtaggggcagctgcacatctcagtctggtcctgacagctggagccaaggggttgtctgcaggagggagggtggagtgagcgactgctcaggaacccctcccatccctgttccgggctctctgcctgcgggggcagaggcagggagccccatccgcctgcccttgccgctcacatggactcacacacttgctccttcatccctgcatgcccccatttgctgagtgtgtgcatgcgtgtgtacctttaacgccctgaaatccaagggtagaggccagggaatgcgagccagggagaggcagaaagggggagacgaagacatgcagaaggggaaaggcagaagcacagggacaaagaaagagacctgggagacagagacacagagacaaagagtgagagagagggagacaggcagacacagtgaagacagaaggaggccgggcatcgtggtcctcatctcagaccctcaccccagcattttggctgcaggcaggaggatcacttgagcccaggagtttgacaccagcctgggtaacataggaagaccccgtctctggtacctgtagtcccagttccttgggaggctgaggtgggaggattgcttgagcccaggaggtggaggctgcagtgagctgtgattgcaccactgctctccagcctgaacaacagagtgatgggggtggctctgcccggctactcatggtggtctcggaggttgtgggggtaccagagccagaacctgtgggtccctctgctaaaattcaggttctctgtctttcatgcgctggaagctgctcactctccccagtaaacaagagtcctgggtttgaacaggcccattttcctctaagtggggcctacgttcgagtcagtgtggtctgagtctttggtggaggctccaagagtggaggcctgtgcagctgtgttagacgtttaagctacgtaaaggattctcctctcctcccctcccctcccctccccccttcccccctcccctccccccttgcccgtcccctcccccttcccccttccccctcccctcccttccccccttccctccctgcttccccctcccctcccccttcccccctcctcccctcccctcccctcctctcctctccttttctttttttgagatggagtcttgctctgttgcccaagctggagtgcagtggcacgatcttggttcactgcaacctccgcctcccagattcaagtgattctcctgcctcagcctccctagtagctgggattacaggcgtccgccaccatgcctggctaatttttgtatttttagtaga[144 bp omitted]tgagacgggttctcactctgtcactcaggctggagtgcagtggcgtgatc[132 bp omitted]tgcttatgtttgcattctatgccaagcttcatgttagcttacgcttcacccgtgcaagcagatgttcatgctttcttaccccagttccttcactgaatcacggcacgtagcatatgattggggtgactatttccccaaatctcacaaagaataatatataactggtagcattctggatgcataggagaaaagttaattccagccgggcacggtggttcacgcctgtaatcccagcactttgggtggccgaggtgggcggatcacccgagatcgggagtttgagaccagcctgaccaacatggagaaaccccgtctctactaaaaatacaaaattagccaggtgtgggggtgcatgcctgtaatcccagctactcgggaagctgaggcaagagaattgcttgaacgcgggaggcagaggttgcagtgagccgagattgcgccactgcactccagcctggacaacaagagtgtaactccatctcaaaaaaaaaaaaaaaaaaaaaaaaagttaattatttacctacatagaacgtcctaggataatagggtttaattcttttaccaaaaccctatttgagagatgaattcagtcacccaaccatccatgtgccattaaatgcattcatccactcatctgtgtacttatcattcagccccaaccatctattcaactacccattcacccatctacctatctatccagagagcgcacagaggctgggcaaactctgactgtcctatggatagtcctatggaccagccgaggcccctgccccaaggagttcccaggtgtaaccgcaagttaaggtgccctggggaggtgacacaggcaccctcatttcttttgttcagtaggagtctctgaggcctccccagtaccatgctgcatgggtgaggccgaggacacagagaagtatcaggaaaagctcttgcccctttatcaggcagggctccctctccaaccatatccattcatggttcattgcccaattcaccacctacccatatctacccattaaacaacccatccatccgtcaatccaaccacatccctgcatcaaccaacccatgtattcacccatccacccacccacccatctgtccattcacccgtccatccacccatccatctacccatccacctatccaaccacccacccatctatgcattcacccatccatccatcaaacaactcatccatccacgcacccatcgatctacccatccacccacccacccatctatcaatctatcatccattcacccatgcatccatcaaccaactcatccatccatccacccatccatctacccatccacccatccagccatccgttcttccatccatccttccacttccctacccaaccatcaacctttcctgatttcacactttttgctgggcaatgctaggaacaaggacgctagggacctaggtcttaccctcaaggcactccctgtcaggtgggagagacagtaacaacatagacacagcacatggccatataagcagcaagaggggtcgctcagacaatatgaagacccagagaagacccagagaaattaagttaaatcttaaacatgtgagaagttttctgggtggagtggagacagccaagggcactcctggtgtagagaagagcaggaacagggaccaactggctatctgtggactaagagacaccattagtgcagagaggcaggagaaatggggccaaaatatggggggtccacaggccagtgagtgcttcagtttaaccaaaggtgaagagggagccacagcaggtctttgagcagaggcaggctagctggaaaggtgtgtttaggaaagagatagaaggtagaggggaaaggggagtgaatgtgtggtggcttcatttctcctgctgttggtccttcttactcctccttttctaggcctacaggtcaggaaaatcccagctcctcctttcctaggcctacaggtcaggagaatcccagctcctcttttcctaggcctacaggtcaggagaatcccagctcctccacctacgtgttgtgtggccttgggcaaatgtggcgcctttctgcgcttcagtttcctccactgcagaatggggatggtaatagtagtgacc[136 bp omitted]catggcaaaaccccgtctctactaaatatacaaaaattagcccggcaaggtggggcgcacatgtattctcagctacttgggaggctcaggtgggaggactgcttgagcctaggaggtcgaggctgctgtgagctgagatcacgccactgcactccagcctgggtgacagtgagagatcctgtctcaaaacaaccccaaacgacaacaaaacaaaacaaaacaaaaaatggggcctggtgtacctggaagctggggctctccccgtgcggggggcctaactgtgtgactcgacccccacacttcccatctccaggggcagggtctcacagcctcccccacgtatgcacctgtgcttgctgtgtctgcggttctccgccagagccttcccgtccctgtctccaccccgccctgggactctacctccccatggccgctctctgtctccatctgtccatcgctcccccgtctgtctccattcccgtccctccctcggtccctccgtctccccgccctgccccgcccgcccctcacctgggcctcactcgctgcccgcgcccgccgccccgggcccggcctcgagcgtggcgagctgcaggcgcacgcggcgggagccggcggcgggcggcgggggcgcgcgggcggctcggcgcgctctccgggagccgggcgcggggcgctggcccgcggcggcgggcgccgaccagcggcgggagagcttgcgcgccaggcgggcgagcgccgagggccgcaggccgtagtcgcgctccagctcctggcgcgagatctcgatgttgccggtgtaccagaggatccagcccagcaggctcaggaacaccagcagcgcgcccgagtagatgagcaggtccccgaagtcgcggccgcgcacctgcagctgcgcgaacacgccggtcagcagcgccgccatgcccgccacatccagcgccacggccagcagcagcgccatccggcagcggcccaggccggccgcgggtgctggcgcggccgccggcgcggacggtgcacccggcgggctcccctgcgaggcgcacaccgctggcgccgccgccatggccctgcaccgccgccgctggcgcccagagagagcgttccggggtgcggcccggtccggggcggggtcaggggacggcgccaggtgtgccaagctcccgcctggtcacctgaaccgggctgggcgcgaaccggcgcggccggggttaccctggtcgtggtttccgtgcaggggctattgctcagaggcctgagctggtggtagccaggcgcacagccacgggtgcctagggcccgtgccacccagggaggtcacatatggccaaaaatcagggcattttagtggtggcagcatgggacactcggagccgggcgtggcgttgtttctgctcagtgtccgcctcccgaagcctgtgcagatcagacagtgcagatcagacaaggcctttagacaccaaggagctctgggacgcgagaaccagtagtcggggtgatctaagaggggaagctccgggttccgcggaagctgagtttccttcactcagcgcgtgtcttctggggtctcctgtgttcagcgaatgaagccacgggcacaaggacggacgagacccatcaggtccagagcgcacccgtggaggaagctgggcgaaccccgactgtcctatggaggatagtcctatggaccagacgaagcccctgccccaaggagtgcccgggtgtaaccgcaagttaaggagccctggggaggtgacacaggcaccctcattccttttgttcagtaggagtctctgaggcctccccagcaccatgccgcgtgggtgaggccgaggacacagagaaatatcaggcaaggctcctgcccccttagggtggccctgacaacggatcataacctcccagggagctgatggggtgtgacaggcacaccataggctggaggcacaggtggagggcagggaagaggaccggcaaatctatagaatcctaaagggagccaagagaagccacatgcaaatctccctccctccaaacaattctcccttagagggcatccgcgctcccctggggtggcagtcagcgagaagtttccgtgtaggttctccccaggcttaaacagtttaagagttttatttcaagaaaaccctggggagggcgaactgcaagagggctgccaggattagccgagggattccgaatgaagacggagtatttccgaacatacacacctctcccaagagcgtttccggagggttccgaaaatacccgagcgggcctcggcgccctcattggccatcaccgcgagggcttacgaagaccggaaatatccaaaggtgccggggctaggcttatatagttcacgcattcaccagttcattcataaaacaaatgtttgttgagcgcccatcatatgccaatcacagtgacaagtgctgggtgagcaatactggagagataacgctgaggtatgggtcccaggacctctcgaattggagccactcggaaatccagcggtagagtttcgaaaacttccgaacggttcccggaatacgctctcggccctctaaccgaagagttccgaatattcccgagcgttgagcgaattttcggcggaagcagccgaacatcatcgagccgcctcggaggtggggaccgacaactcctgtcgtgcccgcccggagaggaagcggaaatgcgtgtacggtattaaaggcgtcgcctcgcccctcgccttcctctttccgtctcaggtcgccgctgcgaagggaggtgagcgttcgtcttcctcgcgtggtcgccatctccggcccgccgcgcactccctctcagtcctctgcctgccttctccccttgcgcctcaagggtcattggcggaccccaacccctccccgtgaagtcgttgtgaattttcaagttattttcccctcactctcattcgccgcagctagtctcggctgcctgaattcggtcccgccgccttaggtcactcagtcccgcctgacaagagttctaggtcgctgtctgccctcaggggtctcccattcacccaagttcccagtcgctctcttcctctgctgtccgagcgtggcccgtggcctaacgctgctttagttctctgtgtctgacgctttccctgtgcccgtttccccgcagccgccgccatgtctgcgcatctgcaatggatggtcgtgcggaactgctccagtttcctgatcaagaggaataagcagacctacagcactgtaagtggggcccggatgcgtggctcctgcgggaggagggtcctgagtctcttgactctgggtcagagggcgggaccttcgcatgtctccgggtcccttattcacgatgccttgtgccgcctccttcccaggagcccaataacttgaaggcccgcaattccttccgctacaacggactgattcaccgcaagactgtgggcgtggagccggcagccgacggcaaaggtgtcgtggtggtcattaagcggagatccggtgagttttgtctggtttgggccagagagcggcccctttcccgggtctgggagctgtgattttttactgtcaggcaggaagagcggtaactgccatcgcggcgggcatccctggcgccagggtgttggtctgggtaccggcttccctctcggccgacttgtcagctctgtgagccgcgcgcgtctgagcccgtgtcctcacctgtaaagtggagaaatgaaaaaggacctgaacttcctcggtggttgttgagagttaaggcacggggttgatgttttcagatgaaattctcaaagcaagtcagggtggggatggatggtttcatcccacaggtgggaagattgaggcacaacaggggaggggccctcgctaccacacttaggaggggacaggctgggttggttgcagccatttgattcccattttgcctgtgtaggttagagaagaggtcttggggaccccactccatacattgtgctgtcaggtgcaggcctttttggggattccctgaatgttcgtgtgagtcgggggtctctaatggaggagtccagcttcacatgtgttcttgacagggctgtattttctttttagagtgagtttttctcaggtccttgattggaactgcctcagagccaagggtccttttactcagtggcagcaacaaacgcagtctgttggctagtgatcctcctgtctcagggacacgtagtccagggagcagccaattgcttggcacttggggaccccgttctggggagtcctgaaagctttcacctcttggattgccgaatacatgggtggcccttcctagactaagggactggcctgagtgaggctgggcctctcagccaagctgatgttgaaccactgctgtggggatgggcctggggttcctgggaagctgttcatacccattgccaggagcgtgggctctggctggacctggatcagatcctaactgaagcggcagctttctggcatgagaaaggagtgttttcatggtggacagaattgggctatgagtgtggcagaagctgtgtcctcagtactccgtgatgacgagtgagcctctgtgaaatggacaggtgggaaaacagctacctgctggcctgcccaggcacccgccacgggcccacgctgctcagcttctcaatgtgagactgtccacacctgcgaggtgtgctaaaggtgcaggttaggtggactgaccccaggacctccctgacccccaaccaggccagcggaagcctgccacctcctatgtgcggaccaccatcaacaagaatgctcgcgccacgctcagcagcatcagacacatgatccgcaagaacaagtaccgccccgacctgcgcatggtgagctggggtttggggatcaggcttggggagactggccagtgctgtggggaagggcctcccactactggttgcaatatgggctggagagggatggattcttgctttcagcctactccccacacccagcattggcctagggggcggcttgtggagtgtatgggctgagccttgctctgctcccccgcccccaggcagccatccgcagggccagcgccatcctgcgcagccagaagcctgtgatggtgaagaggaagcggacccgccccaccaagagctcctgagccccctgcccccagagcaataaagtcagctggctttctcacctgcctcgactgggcctccctttttgaaacgctctggggagctctggccctgtgtgttgtcattcaggccatgtcatcaaaactctgcatgtcaccttgtccatctggaggtgatgtcaatggctggccatgcaggaggggtggggtagctgccttgtccctggtgagggcaagggtcactgtcttcacagaaaaagtttgctgacttgtgattgagacctactgtcccattgtgaggtggcctgaagaatcccagctggggcagtggcttccattcagaagaagaaaggccttttctagcccagaagggtgcaggctgagggctgggccctgggccctggtgctgtagcacggtttggggacttggggtgttcccaagacctgggggacgacagacatcacgggaggaagatgagatgacttttgcatccagggagtgggtgcagccacatttggaggggatgggctttacttgatgcaacctcatctctgagatgggcaacttggtgggtggtggcttataactgtaagggagatggcagccccagggtacagccagcaggcattgagcagccttagcattgtccccctactcccgtcctccaggtgtccccatccctcccctgtctctttgagctggctcttgtcacttaggtctcatctcagtggccgctcctgggccaccctgtcacccaagctttcctgattgcccagccctcttgtttcctttggcctgtttgctccctagtgtttattacagcttgtgaggccaggagtttgagaccatcctaggcaacataatgagacaccgtctctaaaataaaattagctgggtgtggtggtgcaccgcctgtggtcccagctcctcagaggttgagtagaggctgaggtgagcggagcacttgagccaagagtatgaggctgcagtgagcccatgagccccaccactacactccagcctggaagacaccatgacacacagtgaggcctggatggggaaagagtcctgctgttgatcctcacatgtttcctgggcacctaactctgtcagccactgccagggaccaaggatccagcatccatggcacccctggttcctgccatcctggggtacccgattcaaagaaggactctgctccctgtctgagaccacccccggctctgactgagagtaaggggactgtcagggcctcgacttgccattggttggggtcgtacggggctgggagccctgcgttttgaggcagaccactgcccttccgacctcagtcctgtctgctccagtcttgcccagctcgaaggagagcagatctgaccacttgccagcccctgtctgctgtgaattaccatttcctttgtccttcccttagttgggtctattagctcagattgagaggtgttgccttaaaactgagttgggtgacttggtacctgctcaggaccccccgcactgtcccaatcccactcaggcccacctccagctggcctcactccgctggtgacttcgtacctgctcaggagcccccactgtcccagtcccactcaggcccatctctggctggcctcactgcgctgggactccgccttcataaggagagctcactgctcacgttagtagatggccccttctcgtgaggcctctcccctggcacctgcttcagttgtcctccacagcactgatttgcagcccacaagctggcaggtttatctgtctcatgtttgtcttgtgctggtgggcaaggggtttgtctagcacaccagcatataatgagatgcttgatgaatggtgcatattgaatgtataaagcccaccggtcctgagagtttgctcactggagactttctggagatggagtctcgctctgttgcccaggctggcgagtgcaatggcgcgatcttggctcactgcagcctccacctcctgggttcaagcgattctcctgcctcagcctcccgagtagctgggattacaggtgggtgtcaccacacccagctcagtattgtatttttagcagagatggggtttcaccattttgcccaggctggtttggaactcctgacttcaaattacccacctgcctcagcctcccaaagtgctggcattacaggcgctcgaggctttctgatgtggctgctgctgctcagaaggccttgtccttaaccacctccttgcctgccctggaggcttgtgcctctaggccccaccccctgtggagtcctgctggctttctccatccctatctgaatcctccctgctgtgtggcctcccctggtctcatccgtaacacagcccagcttagtgggcctctgttcctgcgggtggccagcctgtctgtgtggctgggctggggaggccacgtctggtatctgaatgctatcggtgggttggggtggaggaaccaggagagggctggagggagggagatggtctcagccccacagagtttggagtcctcagtgtgctgagcaaacgtggagacaccatttccctcctctagacctcatcttggagagagagatgttggatggggccatctattccagctttattcacacaaatcatgtctgttggcctggaaattggaaaaccagttaaaccaaaaacatgatattaagaaaacaggcaggctcaccatagtaaaaatgctgaaagccaaagacaaaattgggagaacaaaagaaaagcgtcttgtcacatacagaaggtccctgataaagttagtagctgccctcatcagaaaccaggcccaggcagtggggacacatccagagtgctgaaagaacctcccccaggtcatcctatccccaagagtgatgcccggcagcattcccagctcagggctaatggttcacggaagccaggaatcaaactgcctgggttccagtcccagctctgccagttatgcccagctgtggggacttgggcagctcgtttagtagcaccgtgcctcagtttcccatatgtaaaaggccattttgagtgcctttcacagccctgcataaggcaggtgtctcagtgttcactgctgtctctccagctcttagtccagtagctgcatggtgagtgagcgtagggcgcaccctggaaggctgccaagcccaaagttgtgcagagcgctggggactccagactccccacagcagcagagactcgggactgaggcatcctctgttcacaggacatgctggcatctactgggtcagggctctgctgctcggtggctgtgcaaccttgggcaagttcctcaacctctctgtgtcttcgtaccctcatctgtaacatgcgtgtcgatagaccctactactcagggttgatgagaagattaaatgtgcaaaacctgcttgactgtgcccacaaatcctgattgtaggaataaattaatgactttttataaatattttgatcagatggactcatgatcacagatgtcttcacatgcctatgactaatttgtacacaaactaatgctcgtgtttcccaagcacctggaagacatgccagatccatgtgcagtaatgcctggtggctccaggtctgccccgccgtcctgtggggctgtgagctttcccagcctcctgcccgtgtttgtgaatatcattctgtcctcagctgcatttccagcccaggctgtttggcgctgcccaggaatggtatcaattcccctgtttctcttgtagccagttactagaataaaatcatctactttaaaatctttcattatgaaatatgcatgtggtcttgaaaaactgcaaatgaaagaagagtatgcaggggaagaaaatctcagaatcccagcccctaagttagccacctgtgcttctcctttttggaaacttcacacatatgcatgcagatctcctctttttgtttgtctaagagacggggtctcactgttgcctgggttggagtgcagtggcgcaatcacggctcactgcagcctctaactcctgggcactctcaattgtcccgccttagccccttgtgtagctgggactaaggtgtgcagcaccacgcctggctaatttaaaaagatattttgtagagacagggtctcactgtgttgcccaggctggtcctgaagtcctgggcacaagcaatcctcctgacttcgtcccccaaagtgttgggattacaagcgtgagccactgcacccagcctcatctttttttttttttgaggcggagtcacgctttgttacccaggctggagtgcagtggcgcgacctcgggtgagctacgcctcccaggttcacgccattctcctgccccagc[224 bp omitted]aacaggaacctcccccttgctccttttccctaatgcactgggctgtctctccatcagcacacacaggctgcgggcccctttcgatggccatcagcgctgcattgatgaagccactcatttaaacacacccctcaatggctaatcccccagaggctccccagcacccctctcctctgttcctcttgaacacctggccctcccccaggcccagccatccctagcatgtctgaatcacacctccagcggccccagctcccaccggcctcccacacccgcccgctcccctgctgtccctccaggctgttctctacacagtagcaaattgatctttacaaatgataaatgagacctgtcatcctcccttggccgacgcacccccccccccccccgacccccatgaggaataaaagcccaaacctttctctagggccagcaaggcccgggatctggccctgtccagtctccccagcctccttaggctgtaatctctgaggcctctctcctccctgaagctcctagctggtccctaggctcagatgaagactgtctccaaaaaaagaaaaaggtataattcacgtaacataaagtccacgcttttagagtgcacaattcagtgatttttagtcttcacaaagctttgcaaccacaacccctatcttattccagaacatttcatcatcctgaatggacacccagtatccatgaagcagccactcccactcatgtcccctctagcccctgccctgccaatcaccaatttgtttttttttttttttttttgagatggagtcttgctctgtcgccctggctggagtgcaatggcatgaccttggctcactgcgacctcagctcactgcaacctccacctcctgggttcaagcgattctcctgcctcagcccctcaagtagctgggattacaggggcccgccaccacgcctggctaatttttgtatttttagtagagacgggggtgtcaccatgttggccaggctggtctcgaactcctgacctcaggtgatctgcctgtgttggcctcccaaagtgctgggattacaggtgtgagccactgcacccagctacaagtcttttttttaaagggacagggtctcagctgggtacggtggctcactcctgtaatcccagcactttgggaggcccaggcaggcggatcacaaggtcaggagatcaagaccatccaggctaacacagtgaaaccctatctatactaaaaatactaaaaactggccagatgtggtggtgtgcgcctgtagtcccagctacttggcaggctgaggcaggagaatcgcttgaatccaggaggcggaggtagcagtgagccaagatcacgccactgcactccagcctgtgtgacagagcgagactccgtctcaaaaacaaacaaacaaacaaaaagataaaggtctgttgctcaggctggagtgctgtggcacaatctcggctcactgcagccttgaactcctgggctcaaacaatcctcccacctcagtctccgaagtagctggcaccaccggtgtgctccaccacacccagctaagttttaaatatttttgtagagacaaggtctcactgtgttacccaggttgggcttgaattcctgacctcaagtgatcctcctgccttggcctctaaaagtgctgggattacaggtgtgagccactgcacctagcccagaatttctatttatttatatatatttttaaaaagaatctcactctgttttccaggctggagtgctgtggcaagatcaaggctctctgtagccttgaactcctgggctgaaacagtcctcccacctcagtctccagagaggctgggaccacaggtgtgtgctgccacacccagctaatttttaaaattgttttgtagagacacgatctcactatgttgtccaggctggtcttgaactcctgggctcaatcctcccaaagtgctgggattataggcgtgagccactgtgcctggccccacccagaatttttaaaacatgaaaaagcttatgttttgggccaatctctaaaatatattaagtgaaaaaaagcaacctgcaaatagtgtaaatgatatgccaacattcctgttaaatatttttaaatatttaaacaataagatgcatgtgtatttgcttgtatatgcatcgaatgcctctggatagtcacaatatgcaaacatttgtctcaaggaaggagagttggaataccatgtgatgaatattagcctttcttttttttccttttcttatttatttatttatttatttttttgagacagagtttcactcttgtcgcccaggctggagtacagtggtgcgatctcggctcactacaacctctaccacctgggttcaagcgattcttctgcctcagcctcccaagtagctgggattacaggcatgcgccaccatgcccagctaattttgtattttaagtagaaacagggtttcaccatgttggccaggctggtcttgaactgacctcaagagatccacccatcttggcctcccaaagtgctggaattacaggcgtgagccactgtgcctggccttctttttctcttttttttttttttttgagacagagtctcttgcactctcccccagtctggagtgcagtggcgccatctcggctcactgcaagctccgcctcccgggttcacgccattctcctgcctcagcctccctagtagctgggactacaggcgcccaccaccacacccggctaattttttgtatttttagtagacatggggtttcactgtgttagccaggatggtctcaatctcctgaccttgtgatctgcccaccttggcctcccaaagtgctgggattacaggcatgagccaccgcgcccagcctctttttctcattttaaagataaaaatttctataatgaaatggctccctttcattcttgtatctgggacaaccagttcccttgatcagggacaaccaatgttaccaggttctcgtgtatttttctggagaaattctatgcaaatgcaaggaaatttatatatgtattcttttgcccccggcttccttacatgactggtagtgtcccatacaaggcatattgcaccttgcttttttgacttaacagtaacctttgtctgagcgcggtggcacatgcctgttatccttgcactttgggaggctgagatgcgaggatcccttgagcccaggagtttgagaccggcctgggcaacacagtgaaattccatctgtacaaaaaaattagctgggcgtggtagtgtgcacccgtagttccagttccttgggaggctgagattggaggatcacttgagcccaggagtttgaagttgcagtgagctatgttggcaccactgcactccagcctgaacaacaagaatgtaaacttgtaaaaaaaaaaaaactttaaaattaaaaattctgaaatacagcatacacacagaaaagtgcataaaatgtatttatacacttaaaaaatcataaaacacctatgtaaccaatacccaggtcaggaaatggaagactaccagaccctcaaaccacccaagtattcaaccctggctggaggtaaacagtattctcacttttaggaaagttctcccccctcccctccccacccctcccctcccctcccctccccacccctcccctcccctcccctcccctcccctcccctcccctcccctcccctccccatccctcccctcccctccactccccttgtttttttttgagacgagtctcactctgtcacccaggctggagtgcagtggctcactgcaagttccacctcccgggttcacgccattctcctgcctcagcctcccgagtaactgggactacaggtgcccaccaccacgcccggctaatttttttgatttttagtagagacagggtttcaccgtgttagccaggatgttctcgatctcctgaccttgtgatccgcccgccttggcctcccaaagtgctgggattacaggtgtgagccacggtgcctggcctcccttccctttctttctgaggcaaggtctggctctatcgtccaggctagagtgcagtggcacaatcttggctcactgcaacctctgcctgccaggctcaagccatcctcccacctcagcctcctgagtagctgggactacaggtgcacaccacagcgtccagaaaatttttgtgttttttgtacagacagggtttcgccatgttgcccaggctggtctcgaacttgtgagctcaagccatctgcctgcctcagcctcccaaagtgttaggattacaggcgtgagccactacacccggcctccttgttttcttttatagtttaccaccaccatatgtatgtttagcaggagaatttatttttgcctatttttgaattgtgtatgaaggcattcaagctgtagtatcttttgtgacttgcttagttttgattatgtttgtgctgtatggtattgtttcttaaatatacaagcatgtttctgctgtttgtaatcgggacaaatgtttttgtttttgttttgagacggagtctcgctctgtctcccaggctggagtgcagtggcgcgatctcggctcactgcaagctccgccttccgggttcacgccattctcctgcctcagcctcctgagtagctgggactacaggcgcccgccaccacgcccggctaatttttttgtatttttagtagagacagggtttcaccgtgttagccaggatagtctcgatctcctgatcttgtgatccacccgcctcgacctcccaaagtgctgggattataggtgagccaccgcgcccggccaggacaaatgttttaaacctgttgtgtatgtccaagtacatgagagctgggcatggtggtgcgtgcttatagtcccagctactagggaggctgaggtgggaggtgggaggtgggaggtgggaggtgggaggatcagttgagcccgggagtttgagtccatcttggacaacatagtgataccgcatcttcttaaagaaaacaacctg[133 bp omitted]gaaaccctgtctctactaaaaatacaaaaattagcccagcttggtggcacacgcctgtaatcccagctactcgggagtctgaggcatgaaatcgcttgaaacctgtgaggcagaggttgcaatgagctgagattgtgccattgcaccccaggctgggtgacacagcgaaactctgtctcaaaaaaacaaaaagaaagaaatgggaatgtgaatttctagagtgggatttgggcttgagacgcaggaaggagttaccccggcatggatggttgtgaagaaatagaaacaaagggaacctcgatgtaaatgaaaaccaaaccgaaaccaaaaaggttgttgagtaataagttgagttcttttgacttgactacaaagtttcaaaatgggctttaccatctcactgttccaactggagtctataggagttcctagtgctccgccaccttgccaacacttggtattctcagatttaattgttgtttttctaggagtataatggcatcaatcttggtttacatttgcatttttccagttactaatgatgttgagtacctttacatgtgttgagtaaccatttggatttcctgtgttgtgaagtgcttgttcaagtgtttttgccaatttttcatgtttttttcttattcgtttgtaggaactctttatacattttgttgcgtgtgttgaggggagtggcgggggtgttgagacagagtctcactctgttgcccagactggagtgcggtggtgcaatctcggctcactgcagtctctgcctcctgggttgaagcaattctcctgcctcagcctcctgaatagctgaggctatgggcatgcaccacaatgcctggctgatttttatatttttagttgagatgaggtttcgccacgttgggcaggctgctcttgaactcccaacgtgaagtggtccaccagccttggcctcccaaaatgctgggattacaggtgaaccaccgtgcccggtttgttttgaggaagggtctccctctctcacccaggctggagtgcagtggtacgatcatagctcactgcagcgtcaacctgcccatctcaagtgaccctcacacttccgcctccgaagagctgagattacaggcgcacactaccatgcctggctaatttttttcttttcttttcttttcttttctttgagacagagtctcgctctgtcacccaggctggagtgcagtggcaggatctcagctcactgaaacctctgtgtcccaggttcaagagattctcctgcctcagccttccaagtagctgggattacagacatgcaccaccacgtccagctaatttttgtatttttagtagagacagggtttcaccatgttggccaggctggtcttgaactcctgacctcaggtgacctgcccgccttggcctcccaaagtgctaggattacaggcgtgagccaccccacccaaccttgtttagtgttttaacggaggtttcattacatgggcatattagacaaatcattgaccattggtcattgacctcaaccttcagcccctctcttcccagaggttggtaggtatgggtggggctgaaattcccaactgtctaattcggtcttggtatttctagtgaccaacccccttcctgaagctacgcaggggcccatcacagatggcttcattaggacaaagactgctcctattaatacccaggagattccaagggattgaggaactctgtcagggctaagggcaaatattatttttattatgcacttcgctaaattatttcagtgggttccgaggcccaggatgcaggcaccttccttcagcaaggactgtttgcttccctcatgcagaaatggttgacgataaacgcagagcttaagatttcttggatggccagtgatgtgaatttgatctgaaaatctgaagggtttcttcccttgtctttccttcgctccctgcactgctagaggtagagaggagtgcagacttttggttccttttctcccttagcttgggagattgtcactggaggcaagggctcaaggaagggtcagacccctttcagaggctgagccgtttcaacctcagctgttttattagaataggcaaattctttcaggacaaaagcagcctttgagttttccactctcctatgggtcagaacttgtagatttttattgtaaatgtattttactttttgtagagatgggatctcactgtgttgcccacgttcgtctttaactcctggcctcaagtgatcctttcacctcctaaagttgggattacaggcgtgagccattgcgcctggcctatttttaatttttttaaaattaatgagacattggtctaaataacctaaacgcattaatagaatgggaagtttccccaccccctggtgtgcacacccaggttaatcccttccccttgagggcagaaactaagactaagctgggatcttacccctgtgatttagtcattatcacttaagtatctggatgggcctgacctaatccggtgagcacctcaaagggaatgggcccttaaatcagacctgccagggcccaaggaggggcagcttcttggagctaagaccctagttctacgaggactgaaatcagccaacaaccatgagcatggaagaggacccagactaaggaacaccaacaaccaatacctcaattttagcctgcaaagcactgagcagagactagctcagccgtgtccagacttccaacacaaagtctgaagtgggtgttgttttaagccgctggctttgtgatctgttgtgcagaaatacatgtgggaacaggctttgctgcccacaagggaaaaaccaatctttagcacaaagcaggatcagatgattcaaggggaccgaaccttggcccagtccagaaccagacagacgaggcgagcctcatgccagactgctggcacctggccgtcctgagcaggaacaccactgccacaccaacgtggccattattctagagggagaagtatagggcagtgccgctcaggccaccaggagcagctccaggtcctcgccccattttagattggaaatctgactccaaagaggggttgtgaccgctctacctccacagaacaaagaggtggacccaaacctcaaacagcaaggctggtgagctagatggacccactgctgcagtccatgaggctttacaaggacccagggcctgtgcaggggagccaaactcccagagccacatggcaccatgcagcggtcctggggcatctgtgagacacagaagctgcttttccaactttatttagaaaaacaaatccaggtcccagtgccccctgtaccctccccgaccccagccataatttaaataacttagagacagagttggagggaggggacaggagaggttggggtcacggtggaaggaggaagagagcccactacagccgccgcagcgcccgcttcttgtccgtctttttcttggccgccagcttcttatcgcgctcgccagcatgcttcttggccatgggaccctcagcccctcccgggccccctggggccccagggtcggtggaggaagcttcagtgccactggccagggcccgaccggcttcggccctgccgctgggcccgccggcgcccccgtggatctctgtgagcagacgggcccgagccgcatactcctcgtagttctccaagagcaggcggcccgcctcctcgttgagtgcagactcggggttagggtggatcagcaggcacttgatggtctgtgggaagaggctcagggtcacagtgggtcgggcaacctacagggacccccaggcctccacaagagggtggcctccgcactggctgttccttctgctcccaactcagctgcagatccaggccccacctatgctgcatcctccctcatctttgctcctgtctccctcagaggccaccttcatgtgacctgcctcacagcagatgttcccaaaaggacacgatgccataggcccaatggtttaaaatgtccctggtcctccgtggaacttgctgggtaacgggggaaacgccaaggccccctctcaggagtccattacttgcctgagccccagacttgagtcctattatggttttgaatttgcctccatgcagttcagcatgaccttagaggccctctggttcaacgagtgaggcctgcagcctggacagagagaagagacttccccagggcctcaggatttgaggaaatcacacctgcgtgttggactctaaagctccccatctttccagatacagcataaatcctgacctctgtcttttatcagacatccgaagttcacagcctaagactctagctgggttggaccacacacaagagggcaagacaccaggactgctggctgaggtgcacttcgagggtggtccagagattcctctcaacccccttcacagcccgtcctgaggggtaaattggagtgcagaggtgtgacctgcagccaggcctccagcagccccagctggatcctctgaagtgggtctgggcaaactggccacagcagtttgctccctggggccactatgacacatacacagtacctggctcagcagatgctcagcagatatcactgatggtgaccaggacacaggttcccaccctaattctcatcactgcacccaaactgcaggtctggctgctcttcttgctggctgagcccctgacaggcccagatgctgacctagcagcaagtaggcctggagctcggtgccaatgtccccagcagcctccaatgacaccccaggggaagggaggcggtacatgtgggagggaagggtttggggtctgtttaccttggagctcaatcctctccctccccatggcaggaaaccccaattccccaccctctctgccatgtgccccagggactcattagaaatttggttaacttttttttttttcagcttgcgggaagggttgggaggcagcaggctgtaagcagcctggagcaccagcctagaccaggacgcctccacctcagcaacaccgcagccaggtcattctgtgtcatggagccatctcgtacgctgcaggatttgggcagcacccttggcctccacccactagatgctagtggcacccccgagttgtgacaaccctttctggtctcctgacaatgcataataccccttggggggcaaaatcacctctggctgagaaacactggtttatgaaccctatcgctattaaaaaaccactgaactgtatactttggaactgagttttacggcatgtaagctcagctttagcaaaaaagcctctaatgagaccccatctctgcaaaccataaaaatataaaaactagctgggtatggtggtgcatgcgtgtaataccagccattcaggaagctgaggcaggaagatcacctgagcccaggagttcaaggctacagtgagctatgactgcgccactgcactccagcctgggcaacaaagagccagtatctttaaaacaaaaagaaagaaaggaaagaaagggaagaaagaaaaaggaaagaaagaagaaagaaaagaaagaaagagcttctaactagacccttgacctccacctgtcagaaaactgtcctacagggtaggcgcagtggctggctcctataagcccagcactttgggaggccgaggtgggaggatcacttgagttcaggagtttgacaccagcctgggcaacaaatgagaccccattcctgttttattttttatcttattttttttttttttttgagatagagtctcactctgtcacccaggctggagtgcagtggcgcgatctcggctcactgcaacctctgcctcccaggctcaagcgattctcctgcctcagcctcccaagtagctgggattacaggcatgtgccaccatgcccggctaatttttgcatttttagtagagacagggtttcaccatgttggccaggctggtctcgaactcctgagctcaagtgatccaccacacctggcctaccctatccttgttttttaaaaaaaagggagaagagaaaaaccatcctacaatacaaactcaccactcgttgcatagtaaggtgctcctgggcacttctcaacagtacttgggtgtcctgggtctggcactgtttgtctttccaggaaagctagcaacatggatttttatgtggaaaccttcaaccacttcagagttgattcagaaaaactaaacaaagcgctatggctcagacaccagcagacctccagaggcaggaggcaggaggcccagccccagcccagaactcaccagcagtacgtgtcggatgcccagctcagccgtccagtccctcttgagcacgttgacgcagatctcgccattggcgcccacgttcgggtggaagatcttggtcaggaagtagcccttgggtggggaggcagggaagtccttccccagcaggagtttcatgcggaacagacctccagcatatggggtcccctctggagtggagggaggggtacagggtcagggcactcaggagtcccaaggcacctcaacaccccaaagtccagtctccacggtctgattgtgatgcaggtgggtgccccgccaactctgccaacagactggaggattctttttttctttttttgaaataaggtctcttgtgtcacccaggctggagtgcagtggcacaatctcagttcactgccgcctgcaattcctgggctcaggtgatcccatctcagcctgccaagtagctgggattacgggcatgccaccaggtctggctacttttttattttaagagatagggtctcactatg[220 bp omitted]catggagaaaccccgtctctactaaaaatacaatattagccaggcgtggtggtgcatgcctgtaatcccagctactcggaaggctgaggcagaagaatcccttgaacccgggatggggaggttgcagtgtgcggagatcgcgccactgcactccagcctgggcaacaagagcgaaactctgtttccaaaaaaaaaaaaaaaaagccaagcgcggtgcctcacacctgtaatcccagcactttgggaggctgaggcgggcggatcacaaggtcaggagttcgagaccagcctggccaacatggtgaaaccccatctctactaaaaatacaaaaaattagctgggcatggtggtgcacgtctgtaatcccagctacttgggaggctgaggcaggagaactgcttgaacccaggaggcagaggttgcagtgagcagagattgtgctattgcactccagcctaggcgacagagcaagactccgtttagagagagaaaaaaaaaagagcaagaatggctgggttcctagggggccacaggacctcccccaaaacctcagagatgatgcccatcttgcagcccccacctgtgtcactatcaagctcgtctgcaccctcctggatcccccgtctcagcccaactgaccactccagtcacaggcccttcccaggtggcagggacccaagtacgcactttcctataagatgcccatttatatgcctttcagatcaaggatccaactgtctgttaattccacagcctcccaacccagtgaacgcctctcccactcacccacttgcttgggtcaaaatactgtccctcccctagcccatcagcagcctgagcaccggcctgctaggtcctcccctgaatctcatcccatctccaaggctagcttcctggctggcctctgggttcttccccctgccaggccggctctcctcactacagtcaataggaactttggagggatttgtcacacccctgctttaaaccttccaccagcttcctctacaaactccttgaagaggcctagaagccctaaaagagcttggcagcttcatcatcaactttcttcatgtgtttttaccaagcgcccagctccacctgcccaagggcctttctggagccttcctattgtcatgatcccgcgccctctgcagcaaggcatgaaggacctcaactgtcaccgctgccaggtctttcctgaccacctaccaccatcaccaccgtggactagaccattccttcacaggctctgctcaaatcctgactttgtaggaattctggtgataacagaaatgtagcctgcatgaaacagtattctaaatcactccgcaaatcatgtgacccgcaaatcattcatgacccgtctccccacgatctgcatctggcttgtttcctcatccctgacactcacagcaggatggagtttgagatcacctggcccaccctcccaggcccttgctgacaccattcccaccacctggagctctcttcccattcctacttaattcctacccaccctcaggtccagggaagccatgtctgaaagccttgcttcaaatctagagtaccgtcccatgatatactaactcaatgaccagatatttctcaacccttgtgggaaaagagtacataattgtcatttgtggcgtcctgccctgtccaccaatgcatcccaacacctgacacgaggccagcctgtaatgggtacttcccgctagggtgatctagagcagggtgatggaggatctaagcagcagccccttctctttttccttccaaactcaccagggccctcgatggtgacctggaggtcggtgaggtcctcctcgttgggaaagaccttgatgccatcgggtgggtctgcggtcagtgtcgtcacctccttgtacaccaggcggatgatgtgcgggggtaggttctccacgttggagttctgggcacggatgggagagcagggtgagcgagtgttaagagctgggcttcccgcagggcctaaagatgctgagactgcccaagtcttgactcagtggccccaggctgtcaatcacccttgaactcccagaccctcacccaggatgcttcaggccatcagcccaggcagagtttccaacagaaatgggggcgggttcacgggggggcttgcagataactccacccaccccagaaccccccccccaaagcccgctcctaaccctgcttggtccccagtggttccacgtaggccagagatctactctctcccccttctccactaatttttggttagagcatccttgaaaccccggctcaggtctggagatggcggcggggcgtccttgctcctggtaacacccatgggcgggccgcaaagcgcccggagccctcgccgccagggagactgcgggccgcccgagctcctgctccgcctgcgggaaggccctcgggcccatcccgggtcagggacccccaggctggccctcaaacccctcaaggccgcccgtcggaggcccctgagactccacctcctccctcagggacacccccgaccaccttcatgggcctcatcgcccgtgctcaccatggctgcggccggccgggggcgggtccccccggcccccttcctgcgttcttcggtccgccggccggggcggggggcccaactgctgccgctgcggccctggagaggccccggcggccccgctccgctccccgctgcctccgacgtccgccgcgcacagcgtagaccaacccgccgccccggtgcccggcagcactgagccggccgcgcgcgcaccactgcctctttataaccgcccgcaggccacgccctccgcggcccctcagctccgagcctcaaccgtgacgtcagcgcgcacgttccttggttttcgacgcgctcgctcccttccccgcaaactatggtcagaagcgagggaagtggcggagagggctgggtagcgggccggccaatgggggcccgcgggggtcgggagggttctcaaagaacggaggggctgaaaaggggaagaagagaggaagggggacggggaaggcgacgcggccgctgattggaccgtttgaatgagacgccgccacggcccggcatacgcgcgggcgcgccctgacgctgaggaagtcgcgcacgcgactaacggtcttcctgggggccggagcgtggcgaggggaggcgggactcggggttttaaacgcgtgatggaaggcgctcgggccaatagggatgcgctttagtgactggtgggtcacgagactcgcatgggccaatgactgatagagaccggtcagagggcgacccagtttcgtgcagatcaaaccgctgccagccaacgaaatccgttgatttttgtatatgcaaatgaagtgtgcgctgccgcccgcgccccctcctttgagccgtggtggaggtgggcgctggaactccgactacatttttctatgaggcgccattttgtgctggaaatgctcttggacccacgtcctgtattgctaaggctcaaagatcagtcagaatgaccttgaaggcttggacagccttgcactccgtgtgtgacccccactcctgccaggcttcatcgaagacgccagcctcagtttccttatgtgacaaatgggcactgggatccgttgtattgccagggaaagaagtcagagagtgccaagacggttattcacggcatggttatgcctatgactgacccatggcctccagccacacccgccttctctgggactcagtttccctctctaggaaatggacacatagctgcctggaaaagggaccatctccagccctcagtgtcagtaaaaacgtcaggcaattgcttgagaacggtggccagagctccctgagcaggccttttggaggggcttagagaggaggagggaatgctgaagttggccttcctttgctcatctgtgcagtgcggtcgcagtgccctctcggtgtctctgccagtctgtgcgtccacagctcttcttagtttcttggcctttttcagccatggatgagagcattaacatctgggcctaatttggccacaggtacctgaaaagacccctggctaccagcttcccctcatggggcctcagcttctgaagaag[133 bp omitted]catggtgaaaccccatctgtactaaaaatacaaaaattagccaggtgtgttgatgcagccctgtaatcccagctactcgtgaggctgagatgggagaatcggttaaagccgggatgtggaggttgcagtgaactgagatctcgccactgcaccccagcctgggcaacagagcaagaccctgtctcaaaaaacaaaaaagcaaaaaaaaaaaaaaaaccaaaaaacaaaacctacatggtcgggtacagtgactacgcccataatcccagcactttgggaggccaaggtaggtcgatcacttgagcccaggagttcaagaccagcctgggcaacatagtgagagacccccaccaatatgtacaaaacaaacaaacccaaaacaactgaagaaacagctacagcataaaaagtcatcatcataactagtttgtggagaaatggcttcaggtgatcccttcctgctccctcaccccaggtccaatctataccagttcctgttgacgtcatctactgaatctcatcacgtccccccatccgctatgccaccagtcctgcttagagtcaacgtcatcccattttgccgataagcattttgctgatcttcaattttagcctgctgggtgtggaggattccaacccaattaacagacaaggaagctgaaggagcaggaggtaaagtgacttgctcggggttccccagctgggacaaggcaaagctagtggctaaattcgtcttgatcttaaaaatccacccaaaagacataacaataatgatgataatactaatggttattatgtattatttgctgtgtgccagaccctgttctagtttctttacatgcttgatgtcatttaatccttgtaacaaccataatgggtggatattattaattattatgatcccctctggatacctgcatttattcaatacatttgttcttctttattagtgtctacactctagctgtcaggatgctatgggatacagcagagaataaaagggacaaagcctcgactttcatggatcttacatcctggtgcgggagccagatagcaagtaagtctataccatcatgtcagcaagtgataaagactgaagaacaatcagcaagtgataaagacaggaacaattagtgggagggggaggtttgagagggagggatggggctgccattttaccttggctgggcagggagaatctgtctgaggaaaggtcatttgggctgttggaaggtctatgggaaaagcattttgagcaaagggaacagcaggtgtcaagaagattgtgcttggtgcttttagggaacattaggaggccagcgaggctggattggagtgaggcagagcaagtagagggctctgaggtgggagaggtgaggggctgctggtgggcctcctaggccatggtgaaaagtatgtctgttttttgagcaatggggagccattggtggctttgagcagagaatgactccttcagacttatgaacagaaacagggaggccaatgaggaggtgattacctttgttcaggtgggatgatggtggctccaagcaggattggtggcattaggaatgggggaagtgatgagatgatgtcaacagcaactggtatagattggacttggggtgagggagcgggagggatcacctgtaccctaaataatcacctgaaaaccgggaaggcagaccttttccaaaaaggttttccaatgctgtggtccattggtctctggtccaactcactaaactctgcccttgtagctcctaagaaaactaatgggtgtgtttccaaaaacaggcagtggccaaagtaggcccctgagctatagtttgctccctgctttacacatatcccacgtgccccaccccagctgaaaactcaagagtcctcctccccactacattttgcataagccccagactccccaaaaacccataagcccttgcaccatctcctgaggcttccttgcctttttctgtttgttcctggaatacgccaagctttttaccctgaggacagttggacaggcagttctctgtgccggtcgtgcttttcccctttccttcttctcatctcctaggtttaccctaactcgtcaccccttcacggcagcttctctcctctttcctcccctcccatgctctctttgcttcatcctctttgaacttcatgatctatcaggatttgcaattatttgcctgattgtgtgtttgactcttcccaactagaagattagccccagcagagcagggatcttgtcctcagtccctagcagggcgccagacagactgaagatgttatacattcaaccaatatttattgagcacctactatgtgccaggcaccaatctgggtgcttgggatttatcagagatcagatagacaaagatctttgtccttgggatgcatcagataacagatagacaaagggcttactgtagttgaggaagacagaaccaaaaatgaaacataataaataaggaaaacatggtattttagaaggaactacatgttgtggtaggtagggaatactctctgttaaccatgtttttcctctgctctcatgccacaataatcaactgatcttcaacaaagcatacaaaaacataaaatggggaaaggacaccctacccgataaatggtgctggggaaactggcaagccacatgtagaaaaatgaaactggatcctcatcgctcaccttatattaaggttggtgcaaaataaatcgaggtttttgccattattttaatatttgcaagctatacatctgacaaaggactaatatccagaatttacaaggagctctaacaaatcagcaagaaaaaaaatgatccaatgaaaaagtaggcaaaggacatgaatggacaattctttcaaaagaagatattgcaaacagccaacaaacatatgaaaactgctcagcatcactcattatcagggaaatgcaaattaaaaccacaatgagataataccttactcctgcaagaatggccataattaaaaaaaaaaaaaaatagatgttggcatggatgtggtaaaaagggaacacttttacactgttggtgggaatgtaaactagtacaaccactatggaaaccagtgtggagattccttaaagaactgaaagtagatctaccattcgatccagcaatcccactactgggtatctacccagaggaaaagaaatcatatgcaaaagacacatacacatgcatgtttatagaagcacaatttgcaattgcaaaaatacggaaccaacctaaatgcccatcatcacccaatgagtggatacagaaaatatggtatatatacaccatggaatactactcagccataaaacagaaaacagaatgaaataatggcattctcagcaacttggatggccattattcttttttttttttttagactgaatctcgcactgtcacctgggctggagtgcagtggtgtgatctcagcttactgcaacctccgcctcctggcttcaagcgattctcctgcctcagcctcccgagtagctgggattacaggcgcccaacaccaagcccagctaattttttgcatttttagtagagacggg[145 bp omitted]aaaatcaaataccctatgttctcacttataagtgggagctaagctatgaggatggaaagacataagaatggtacaatggggccagccattgtggctcacgcctgtagtaatcccaacactttgggaggccaaggcaggcagatcacttgtggtcaagagtttgagactggcctggccaacatggtgaaaccccatctctactaaaaatacaaaaattagccatacatgttggtgggcacctgtaatcccagctactcaggaggctgaggcaggagaatcaccttaactcgagagatggaggttgcagtgagccgagattgtgccactgcactccagcctgggccacagagcaagattccatctcaaaaaaaaaaaaaaaaaaaaagatacaatggacttcggggactggagggtaagattgggagggggtgagggataaaaggctacatactggatacagtgtacactgctcaggtgatggaagcaccagaatgtcaaaaatcaccaccaaagaacttatccatgtaaccaaacaccacctgtacccccaaaactattgaaatataaacaattaaaattgtgatgatggtcgcaaaactttgtggatatatactaaaaaccattgatttatgtagtttatatgggtgaattctatgatacatgaattacatctcaattaagctttttatcttttttttttttttttttttttggagacagggtcttactctgtcacccaggctgtagtgcagtggcatgatctcatctcactgcagcctccacctcccaggctcaagcaatcctcacacctcagcctcccgagtagctgggactacaagggtgcaccaacacaccaggctaatttttgtgctttttatagagattggttttctccctgctgcccactctggtctcaaactcctggcctcaagcaatccatctgcctcagcctcccaaagtgctgggattacaggtatgagccactgcacctggcctaagccttttttttttttttttttggtaagaatttaaaaagttactgtgatgggggaaactcaaagaaagtcatagggatgggagaaagagagagagagagatctgagggacagtgttccaagttgggagaggtggccgggaagggctaggctctgcagactccagaaggccaccgtgaagagtgtgcgtgagctctagggagctattgaagaggtttttttttttttctttttttttcttttttttttttgagatggagtctcgctctgtcgcccaggctagagtgcagtggcgtgatctcggctcactgccagctctgcctcccgggttcacgccattctcctgcctcagcctcctgagtagttggaactacaggcgcccaccac[138 bp omitted]cctggcctattgaagagttttgggcagaggggtgactggatttggtgctcatattgggactgtagctcagggctgctggtagagactggactggagggtccagattggaagcagaaaatccagcagcaagtggactgtggcttggcgagggtggcgaccgtctgggaaaggggtggagggaagggagcagatgtgagaactaatcagaaggtggtctagtgataggcagccttccaaatcctttgggagacaggaattgtcagaggatgggattgggaaggggcaccctttctttgctaagtactagtaacccatgaactcgcttttgttcagggccgggcgtggtggctcatgcctgtaatcccagcactttgggaggcctaggcgggtggatcacctgaggtcaggagttcaagaccagcctggccaacaaggtgaaaccgcatttctaccaaaaatacaaaaattagccgggcacggtggtgcatgcctgtgatcccagctattcaggaggctgaggcaggagacttgctttaatctgggaggcggaggttgcagtgagccgagatcacgccactgcactccagcctgggcagcagagtgagactctatctcaaaagaatttacttttgttcagtgaaacctaaattgtccctttggcttgaattctggtttcagaaattaatcttcatttctgtccatctgtattaaattacaaaagaaataggtgtttggagggaaatccacagttactgaggcatgggaaatgaaggctggaggtgctgctctagccctccttcccctcctaccctccacatccacacttctctccgcagcccttcccgtccacatcgatcagtagccttcaattaaactgctgcacagcaagtgtcactcaatacaatcacagtatagagcaggtgcagtggctcatgcttgtaatcctagtactttgggaggcctcagagagaagatcatttgaacccaagagttcaagaccagcctgggcaacatagggcaaccctgtctctataaaaaaataagaaattaattttttttgagagagagagtctcaccctgttgcccaggctggagggcaatggcgtgatctcggttcactgcaacctccacctcccaggttcaagcacttctcctgcctcagcctcccaagtaacagggattataggcacgcgccaccacgcccagctaatttttgtatttttagtagagacagtgtttcaccatgttggccaggctggtctcaaactcctgacctcagatggtccgcctgcctcggcctcccaaagtgctgggattataagcgtgagccaccgcacccagccaaaataaaaataataaaaaaaaaagttagccaggcttggtggtgtatacctgtagtcccagctcctcgggaggctgacgtgggagaaacacttgagctgaggaggttgaggctgcggtgagctgtgttcacaccactgcactccaacctgggtgacacaggaagaccctgtcgcaaaacaaaaacaaaaactctcaaaaaacaacagaaaaggtcaaagatcccactgtagtttcatcgtactctctgactgatgggcatcaaggctgagcccagcgcatggctagacactgctgtgagcatcctccttcatctgttcatctttgggtacagccgtgaacatttccgaaggacaaagtcttaggggaactttcaagatcaaagagaatgcgtgcttgccattctgcccagtggcccttggcagggttctccttatttggattcccaagatgtgacttactcgtttaacccgtatttctttagcaccagatatacaccgggcactgttctgggtgcttgggacacatccgagaacaagataggaaacaaaatccctgccctcctggggcttccattccagcggggagactaaaagtcttcctgggactgagtggcagcccaggatgcaggcctttgcatgctcacactggggaagtcctgggctaataggtaagtcaagttggtagtattaaaagatattggcaatgcacagtggctcatgcctgcagtcctagcactttgggaggctaaggcaggaggatcacttgagctcaagagtttgagatcagcctgggcaacatagtgggaccctgtctctacaaaaaaattaaaaattagccaggagtggtggcacatgcctatagtcctagctacttaggagggttgaggcagaaggattgcttgagcccaggaggttgaggctgcagtgagccatgatcacgccatggcactccagcctgggtagcatagtgagaccctgtctgaaaaatagaataaagatattaattgctgtaaatattagtgtaggctaaggaggttcaggaatgttgtgagggggacagttttttttttttttttttttgacggagtcttgctctgttgcccaggctggagtgcagtggcgccatctcggctcactgcaacctctgcttcccaggcagagattctcccaggagaatcaagcagttctcctgtctcagcctcccaagtagctgggactacaggtgcgcaccaccatgcccagctaatttctgtatttttagtagagatggggttt[142 bp omitted]tgttgcccaggctggggtgcaatggcgtgatctcggctcactgcaacctctgcctcccaggttcaagcagttctcctgcctcagcctcccaagtagctgggattacaggtgtacgccaccacacctggctaattttttgtgtggttagtagagacgggctttcaccatcttgtccaggctggtctcgaactcctgacctcgtgatccgcctgccttggcctcccaaagtactgggattacaggtgtgagccactgcgcctggccaagggggacagttttaaatatggtagaactaattgagaaggtaacatctgaataaagattcaaatgaagcggccgggcacagtggctcatgcctgtaaacccagatcccagcactttggggagctgaagtgggtggatcacttgaagtcaggagtttgagaccagcctggccaacatggtgaaacctcgtctttaataaaaatacaaaaatcagtagggtgtggtgattcgtgcctgtagtcccagctacttgggaggctgaggcaggagaatcacttgaacccaggaagcggaggtggaggtggtggtgagccgagatcatgacactgcactttagcctgggtgacagagcgagactttgtttaaaaaaaaaaaaaaattaaaggaagtaagagagcaagttttgtgggaatccagagaaaagccattccaggcagaggaaactgccagtgtcaaagtcccctcacaggagtgagcctgacgatgagcagtcttcaaaagattccacatcatgggcaagtcaaggtgtcccatcttttatttgcatctcctttcttcccagtgaggttgagcatcctttcctgagtttctgtgtctgctagtctgtggttggtagcaggttctctgctccttagttcctgagtacttctgagcagacacttgtgaccttcccagcttgaggggtctgcacacgctggggtaggtaattgacaaaaactactttcctctgtgcctctggagctgaacttggaactctcctgggtgggagaggccctgatcaatgcaaaaataggcccttaagtggatcgggtgctccctctagtgacagacacagcagtaattaaatgcattacccggggccaatcctgcttcgcaaatccctgagcacaaggcagagacttcttgagtgcactaggaatttcttgtaatgactgtacaaccaacactggtgacgcacaccaagcttaaacagaaaaatgcccagtgctggggagggtgggagcacacggacattttcacatacatggacttggcacaggccctctgagtcgtagttggcattgtctagcaaaagtcttcaaaatacacctgccactcatctcctgagagctcatcctaaagaaaatggagggagtggccgggcgcggtggctcacacctgtaatcccagcactgtgggaggccaaggcgggttgagggagtggccaggcgcggtggctcacacctgtaatctcagcacttcgggaggccaaggtggattgagggagtggccaggcgcggtggctcacacctgtaatcccagcacttcgggaggccaaggcgggcagatcacaaggtcaggggattgagagcagcctggccaacatggcgaaaccctgtctctaccaaaagtacaaaaattagctggatgtggtggcagtgcctgtagtcccagctacttgggaggctgaggcaggagaatcgcttgaaccagggagtcggaggttgcagtgagccaagattgcaccactgcactccagcctgggcgacagagcaagactccatctcaaaaaaaaaaaaaaaaagaaaaaagaaaaaagaaaaaattaaaggaatgcaccaagtgttgtgcaaaaagatgttcctcaagtattgtttagagtagtaaaaactagggaaaacccaaacatctattggtagtgatggcaggggctgctgctatcatgctggctgcagcagggaggtgcagctggggctgcacgtttcatggagccgggggagccccgccccttctgagttggggcagagctccccaggtgtcactgcagtcacccaaactgtggctgtggatctgagcctccctgtgctcttgggggtgaggggggtggtgccaggaacgggcaggatctgtcctcctgggtgcagctgcagccaccagacccggtactgcaaatctgggcctccagctccacagagcaggcaggagctgggacaagtgggagccctgccccttctgaattggtggggtgggagcttctgggtgcagtggcaactgccctcccaggcatgggactcaagagtctctgcagcctgcacccttgggggccccaggaagggccccccatcccttcagtctcaggggtgcctgttcccactgcctggcttctcaccgctcctggctcctgctcccatctcagatcagtggttagggcagagccccggggctgtgaatggcagtaggaggcctgggcagaagggggcagtcctaaggagggcctgaaggctgggggctgggctatcagtcctgaggaccagagtggggacacgcggtgcctcttctgggctgcccatggctacccatggaccaatcagcatggacttccttccctctgaggcccataaaagctctgggctcagccagagcagggcaggggacagccagagaaggaagagggaggagagaggattggactaccagtggcagagaagagctacctgcagactacctgctggcagagaggagccacccccaccagggcctcctctctgctaagaattgcagacattaggatgaccagttgtagggaggagctaccctctccagaacctcctgtctgctgataactgaacactcaacagatgacctgcctacagagaggagctacccactgtgggtcctctgagcggttgtaacactaaatcaagctcatccttgtcttcttcacccttcacttgtctgcgtacctcattcttcctggactcaggacaagaactcaggcaaaggcatcattggcaacagaggtttccagcggggaagaaaatctacaccccaaagatcctgtagcagtaggaactgggaaaaaattatgctgcatccatacaacagaatatgctatagccactgaaaatgagggaggttttgttgttttttgaatcactggtgtctcgaagaatctgatgaaagtactggatccatttccctgaaaaaagcaagtacaaatgctaacgaatacatgtgagaagaataatgagtttggaaaattatcatctgaagattgctgttcaacttttggagagtgatattcagatgctttgaagacttccaatattcaaacatcgttgtaatgcctgattcagccaaggccgggcatggtggctcacacctgtaatcctagcactttgggaggc[134 bp omitted]ggagaatcgcttgactccgcaaggtagaggttgcagtgagccgagatcacactgctgtactccaggctgaatgacagagcaaggctccatctcgaaaaaaaaataaaaaaaaattgattcagccaagagaatcatcagtggaggccaaagcagcatgtgaaagtttgaggagaaaaaagataactacatagcatcaggctaagtgtggtggctcatgcctgtaatccaagcactttgggtagttgataccttgatcttggacttccagcctccagaactgtgaagaaatagacttctgttgttggccaggtgcagtggctcccacctgtaatcccagcactttgggaggctgaggcaggaggatggcttgagcccaggagtttaagaccagcctgggcaacacaatgagacccccatctctattaaaaaaaaagcttaaaaattagccaggcatgttggtgtgcacctgtaatcccagctattcaggaggctgaggtgagaggatcccttgtgctcagaaggccaaggctgcagtgagtctcgttggtgccactgcactccagccttggtggagtgcactcagagcatatgagctctgagcacatgaacttcaggaagcatgagagcatgggcttccttcagccaaagcgctgagactctggcatcccttctgtggttttcctgtctcacacatgtaacccagatctaatcatgaggaaacatcagatgcgcctaaatgcaaggcatattctataaaatggcctacctggattctttaaaaaatcagcattaaaaaaggcaaagactgggctgggcgtggtggctgccacctgtaatcccagcactttgggaggctgaggcaggaggatcacttgagcccaggagttctagcctgggcaacatagtgagaccccttctcttaaaaaaaacatctccttaatctctgcgtgaattgtgtgcaataataaaaaataaaaatagaaaagaaagacaaagac[136 bp omitted]cccgtctctactgaaaatagaaaaaaatcagccaggcttggtggcgggcacgtgtagtcccagctacttggaaggctgaggcaggagaatggcgtgaacccaggag[140 bp omitted]tgtcacaaactgaaagctgctctgaaagacagtagcaggacgcttgatgcaattcaaacatggacttggtcaatgctaaattcttgagtgtgataattatgctgtggatgtgtaagagagtggccttgttcttcagaatggcctctaggggtaaagggatgtgataggtgcaacttactcccaaatatctccaaaaaaaaaaaacacgatttttttcttttttttagaaggtgtctcgctctgtaacccaggctggagtgcaatggcacgatctcggctcactgcaacttccgcctcccaggttcaagcgattctcccgcctc[134 bp omitted]gcctcccaaaatgctgggattacaggggtgagccactgcacctggcttttttttttctttcttttttttgatggagttttgctcttgttgcccaggctgtggtgcaatggcacgatcttggctcactgcaacctctgcctcctgggttcaagcaagtctcctgcctcagcctaccgagtagctgggattacaggcgcctgccaccacgcccagctaattttttgtatttttagtggagacggggtttcattatgttggccaggctggtctcaaactcctgaccttaggtgatccacctgcctcagcctcccaaagtgctgggattacagacatgagccaccatgtccggcattttttttttttttttttttatgagacaggttctggctttgtggcccaggctggagtgcagtggtgtgatcttggctgactgcaacctctacctcctgggctcaagcgatcctcccgcctcagcctcctgagtagctggaactacaggtgcatgccagcatgcccagctaattttttgtgtgcatatatatatatatatattttgttgttgttgttgttgttttgttgttgttgttgttgttttggtagagatgaggtttcaccatgttgcccaggctgatgtcaaactcctgagcttaagcaatccacccatctcggcctctcaaagtgttgggattacaggtatgagccaccgtgcccagccgagatgaatatttatatggaaagaaaaccatacaatgatgtcatataatggtaacaaatggtgagttggtgaaaatgacacagaagttctttgacttattcttgtaactgttctgtacatttgaaattatttcaaaatataaagtcaagaaaagtgaaatgaaaaagcatgcacacaacatctggcatagatttgagacattcacaagcccacccttcaaatgcgggttaagaatagctgctgagaggctgcatttattggcacagtcgggttgccagttgagcgagtgttaggtgacaaaggcgaacactgaaggcagaatgctcatgtcagatcttatccttgacttgcccgccctgcacacagtgggtgtggagcagattgctcttctcttgttgaacacaaatgaatccgttggctggcatgtggcatccatgaggaatgaaaatacatacactgaagcactggagttccgattcagagtgggaagctaatcaccctctgagggagaggaatgagactccagtcgcccatctctctcacgtgtcttggcatatgcttagtgaggggaatggcaggcaaagtctgcaccatttgcatttaaatctacgctgtgggaggctgaggtgggaggatcgctcgaggtcaggagttcaagactagcctggtcagcatagccagattcccatctctacatttatatttttttaaattcttttttctttcttttctgttaattaattaattaattaatttatttatttattaggcagagtctcactctgccagccaggctggagtgcagtggcacgatcttggcgatctcagcgatcttggctcactgcaacctcctcctcctgagttcaagcgattctcctgctgcagaa[132 bp omitted]cgaaaccccgtctctagtaaaaatacaaaaattagctgggggcctggtggtgggcacctgtaatcccagctagtcaggaggctgaggatcacttggggaatcaaggctgcagtgagctgagattgcaccactgcactccagcctctgcaatagagcaacaccctgtctaaaaaacaaaacaaaacagtagagagtacacttgccgatacaaaaatccagaagtgcaaaagggcatttagaagtaaaaagccccagccatccagttcccctctccataagcaaccctgtcagccagaatgggctatgctaggctgcagtaacaagtagccccaaagccctggttgttaaagcaacaagagtttatttctcattcgtgctacatgtgcatctgcggctggtggagcccctatttggcatcatccttactctggggccctggctgatctgcctgggactcaggccagcagagcagctatgacctgaaatatgccagtgcccatggaggagggaaaagacagagcatgggagaaccacaccctgtctctcacaagcttctgcctggaaagatacttctgcccgcacttcataggccaaggcaagtcgcacgggcacagctaacttcgggggcagggaaatagaatcctaccatgtgcccaggaggagaattggaaatatttggtgcagcaaatttatatacagattctgttccccgctccttttacacaaatggtagcattcatgcacactattctatatcttgctttcttacttaacaataaaccttggagactatttcacactgggtgatgtgggcaacatccaaggcatcctcattctcttttatacagcttacttgcactattaaatttctgtttctctttctatatatacagttgggtgcagataagttaactatacttatggcataatgtccttctattattagatgaaaaaagcaggggccaggtgcgctggctgatgcctataatcccagtacttcgggaggccaaggcaggagaattacctgaagtcaggagttcgagaccagcctggtgaacgtgatgaaacctggtctctactaaaaattcaaaaattagctgggcgtggtggcgcatgcctgtagttccagctactcaggaggctgaggcacgagaattgcttgaacctgagaggcagaggtggcagt[183 bp omitted]tggtgaaaccccatctctactaaaaatacaaaaattagcaaggcatggtggtgcgcacctgtagtaccagctactagggaggctgaggcaggagaattgcttgaacctgggaggcgggggttgcagtgagccgagattgtgccactgcactcccgcctgggtgacagagcaagactccatctcaaaaaacaaaacaaaataaaaaaagaagtaaaagaaaaaagaagttacagagcagtctatatataggaaggctgatttgtaaaaaaaaaaaaattgttttcatgtggaaatttctagaagaaaacatagctaatgtaaacagcatttgactctaagcagtgagaaatcaggagatctccattttgttatctccttctctggattttctaatttttttttcccctataacaatcactgtcattgtgacagtgcacttggttgccaggaacagaagccaagagaggtttgtgggagaactgagggacttccatgggttcacttgttcctcaagaacaaggaccttgtttgtgccgttcactgtattttgttgactgaattagtgaactggcatagcagaaaataaaattcaaccgtgccccttggagtctcaaactggggatgggtagttgctgcctcatggtatttttctacctctcttttatctgtgtctctccagttctctttccagagtgatgcgcaaacaaaccctcagatgcaaggtgaaagcctgaagcttagagacaaatatttagttgcatctagggagaattttcctaaagttcgtaaaattggtacatagaggaacctcccctcctggccagagtctgcatctgagcactaaggtaaggaggcaactctcgtcagcactgtgcaaatgttttaatgcactgggtgggaaagggaagcaggcagggagaatgcttcctttttgtattttttatttttgagacaaagtcttgctctgttgcccaggctggaatgcagtggtgcgatctcagctcactgcaacctctgcctcccgggttcaagtgattctcctgcctcagcctcccgagtagctgggactacaggtgcgcaccaccacatccagctgatttttgtgtttttagtagagacatggtttcaccacattggccaggctcgtctcaaactcctgacctcaagtaatcctcccacctcagcctcccacagtgctgggattacaggcgtgagccaccacacctggctattttttacttttgagacagggtctcactctgcccaggctggagtgtagtgatgcagtgatagctcactgtagccttgaactcctgacctcaggcgatccacctgcctcggcctcccaaagtgctggaattacaggcatgagccaccacacctggcctatttttaaatttttagtagagatgaggccttgctatgttgcccaggctggtcttgaactcctggcctcaagcaatcctcatacctcagcctcccaaagtgctaggattatggttgtgggccaccatgtccagttggaaaatgcttcctaattgtcataaaaatggacacttcagtggacatcaccatgccatgcctcctcttatgggtcgaattatgtctctcaaaaaagacgtttgagtcctaactacccagtccctgtgactgtgaccttatttggagagagggtctttgcagacgagcaagttaaaatgacgttatctgggaggctcctaatctaacgtcatcagtgtcatcataaaaggggggagtttgggctgggtgtggtggctcatgcctgtaatcccagcactttgggaggccgctgagggcggatcacgaggtcaggagttcaagaccagcctgaccaatatggtgaatccctgtctctactaaaaatacaaaaattagctgggcgtggtggtgcacgcctgtagtcccagctacttgggaggctgaggcaggagactcgcttgaacccgggaggcggaggttgcagtgagctgagatcgtgccactgcactccagcctgagtgacagagagagactctgtctcaaaaaaataaaaaaaaagtgtggggcggcatttggatacagagacagacagacacagagggaagactatgtgaagacagggagaaccgcagctacaaaccaaggaatgcctaagataccaaccaagcaccaggcctgagagaggcctgagcagatcccctcttgagaaagaataaaccagccctgccacctcctttttaccttttttgttttttgaggcagagtctcactctgttgcccaggctggagtgcagtggtaggatttcggctcactgcaacctccgcttcccaagctcaagcaattctcctgcttcagcctcctggttagctggaattacaggtgcctgccaccacatccggctaattttttttttttgtatttttagtcgagacagcgtttcaacatgttggccaggctgatctcaaactcttgacctcaggtgatcctcctgccttggcctcccaaagtgctgggattataggcatgagcccctgcacctggccggcctgccacctccttgatcttggacttccagcctccggaactgtgagccatgaagttttgcaaaactagtacaccccacccacacccctacgctttaatgctattcggccaaataatttgaatataaggaggtgacctctagaatctacaaacaaatgctcacatgctcagaggacagagggctttgttaggacaaaacccagaacttagaagcaccttacagtgcacccccacatccatcccctgacccctcagctaggtggtgggccctggcctgggaacaaatgcttcaagcccaacctttggcaaattgcccacctactacacccagctacacgtttgaggccagggggcctcccctgtgacccataaacgtgggtggaaatccatcctttctccacagtaagccttgagaccttcgatcaggaaaatgtctatttattccaaaaaataccaagtcgcagctcctctggctgtcctcaccagggaattaattaggggaaggggccagtgttggagagggggtggagagaggaagtgatgaggagggaggcagaagctgttggagggtcttcaggtgtggaactatttatcttctccctgtgaagtgccccctcccatgctcccccaaccagacggggagatgcctgtgtgtgtgtgcttgtgtatgcatgggtttgtgtgcatttgcatttgttggggcatggggaagtctcagatgacgaggtcccagctcaagacatgtggaggggaattgtcagtacacacctgctcccacccctcaagacctctctcctctatggcttatttgagatcaaatcaaggccccagggtcaggcagcctgtgccaactgaatagggacagggctaggggtgggatccctggaatccaggctgggctagagctagtggaggggggataaaaaagctgaaaggcccagacccccaaatcccggcagctggagaaagctgagtgttccgcggaggtgttgagcagaggggagggggctgggagggggtgggtgctcaagctggctcctttctggggaagtcacagttggcctgagcagtgcggggctggggaggccctggaagggatgggaggagcccctcagagcagctagaagccgtggggttgaaaaactggcaccagggcccaggtggatttgggtaacccccatttcctcagtgtggtgggaaccaagggccagttgtctgccccaagctcctgacaagaaggagtgtgaggtgccagtgtttgcggggagacataagagggagggggacggcccaggggaggaagaagaggccccccccacctcgccctaggggctgggggaggggcgtgtagccctttaagagtgggggaatggccgcccccgcaacatggctatgtacaaagagaattgagggaagattgtgcattgggtgctggggacttcctgccacccccggaggctccccgggtgttaaggtgttagggagggaggtgaaggagcacccctggtcccgcagatgtgctggcagggaccattgctctccagtgtccctgctgcaggatgaggccagcagaagacagcactgaaggccccagtcggtcaccagctttgacctatcccgcgggggtcagggatctctgaggagaatttggccggggccagtggagtgctgatcctggtaggggcccaagtgacagggattgggcagggggcagtggcgtcacctgagggttgaaatgcttcctctctggtgataatgagaggttgctgggttgaccctgtcaccaatcagatggctgggtgagggacagcgctgctgtcaggaggggcctgggtgcctcaccggggggtaaggtgaggttggctgaggccacatctgtggtgggattgatgcaggcatcatcctcggtcaggagtgaggcagtgacataaggagggccagagtaggggtgaagtcttcagagggggacagctggccccacccctgtccttttagtggaaacgggaatatggcctgttgtgctggttccccttaagtgaacaactgtaagtaccatgcggccccagaggacaactgaaatacagcccgtcacggtacttggctcctaagatgatggctcttgggggatgatggcacatggttgcagtggactctgggatgacaccagggttatggtggatcctagtgggtggtgacagcactggacctcatggatcctgggagatgataacaccagggtcatggtggatcctaatagatggtgacaacactggacctcatggatcctgggagatgataacaccagggtcatggtggatcctagtagatggtgacaacactggacctcatggatcctgggagatgatgacaccagggttatggtggatcctagtggatggtgacagcactggacctcatggatcacggatgatgacaccagggttatggcggatcctagtggatggtgacagcactggacctcatggatcctgggagaagatgacaccagggttatggtggatactagtggatggtgacagacagcactggacctcatggatcctgggagatgatgacaccagggttatggtggatcctagtggatggtgacagcactggacctcatggatcacaggagatgatgacaccagggtcatggtggatcctagtggatggtgacagcactggacctcatggatcacaggagatgatgacaccagggttatggtggatcctagtggatggtgacagcattggctctcgtggatcctggcaggtgataacaccatagttgaagtggatactgggaggtagtggcacatgtttgaatgaaatcctgggaggtggtggcacatggttgaagtggatccctggagatgatgacaccatgcatccctgcaaatgatgatgacactattgggcatcatgggtcttgggaggtgatgacaccaaaatcatgagggattatgggaaatggtggaatcatcagtcctagtggatttcagtagaggatgtctctgtcaggtgtagtggattctggaaggtaatgtcatcactggtcatggtggaatctaggagatgatgacaccgtcagctgtggtggctcctgaaagatgatgacaccatggttgtgaggaatcatggaggatggtgacaccattggctatggggagtcttggcagatggtgacaccattagtcatggtaaatcctggaagaagatgataccatagttgtgggtcataggtaatcctggggaaggattccatcctcagacatgggtaacacttgaccccgggtgtggtgccatcatgagtggcgggtgttgtgtgatgctgacagtgtcagtgagggcaagagtaggtgtaccccaagcacctccccccagtagaaggctaggactttgttgacagaggtgattgtctctagatatggcagaaagaaaagtgaggccaggctatgggacacctatgagtgccagaactccaggatcctggtgatccagagtggcctcctgggagcagaaggccatctggaggtcctgtctcccaggagtcatggcacagatgtgggatccaaggccccatttcccctcagagggtctggcagagatcctgctggacatgtccctggagtctggggagggagcaaccaagctaagtcatggtgggacaaggcagtaactctggtgacaccaccaataccgatggccttccagagtgggcagtgcctctgaggaggaagctctggtgatgccatcacagcattgggggtaggggtgtcactgccaacagcctacacagaccatcatctctggaggaggccctccacatgggcggctccccagcgatgcttccttcagacaacatctcaggacagggcccctctctgctctctggcatcttccctggggtggtcctggactctgggcctgccctgccttctacaacatggtggcagcagtggaggcatctctttgtgccatctcagagcacatagcatctgggcgacatcacagaagggacctcctcctggagaggtcccagagtgggtggtcatctctggtgatgacatcacaggaagaggcacggtccctctgatgacgtcatagggcaaggcaccttctctggtgatggcatcacaggaaggaggcagggtccctgtgatgatgttgtgaaaaggggaccttatgtctagtgaggacacaatcggtgaggcattttcccctgcgacgtgtcccaggaagatggctttgtctgtaatgatgacatcataggacagaggcatcttctctgctgcaaagacacagggagaaaatatcttccccatggcgatgatgccaaaagaggccttggagttagagatgacatcatccaggtgagattgtctctgcagtgacaccacaggaaggaatgtcatggaacaaggcgtcgtctctgttattataccacaagaaggaagcctctgaggacaccatagaacatggacatggcctccagcgctgacctcacgggccggcctcttcctctgtgatgacctcatgggaacgaggctttgtccctgtgatgacatcacagaacacagacatttttgctagtgatgacctcatgagccggcctcttcctctgggatgacatcatgggaaggaggccttggctcaagcagtgaagtaataggaggaggaatcttgtctgccaggacatcccagaaggaggctttcactcctgtccaagggccgatctgggccccaggcccctggcatgtgtgcgcctgtgtcgggggatccaggctgggacggggggcccgggaggccgcagccccccagacccggccctggcctcagacagtcacctcgttcttgctggccgtgcgcaggtgctggggcaggtggtggcccgggatgaactgcagctgctccagcgtgccctggcgctggaagggcggcctgcgggccagtgtgcccccgcccccgccggcgtcggacatccaggccggctgcggcgagccgtgcagggcgtggtggtggtgggcgtgcaggctggacggtggcggcagcccgcgcagcggtgttgggggccccccgggccccagcagcaggttggagtgcgaggcggccaggctggcccgggcggtggggtcggggggcagcgcggggctgcgcgggggcgacagcaggtgctcgcgactctggcgcagggcctcgggcgaggacagcagcaggtgctcctgcgacaccaggcgcgcgcgcggcagcgtgaactcgtagcgcgaacggccaccatcgcccagcaggtgctcctgggacatgacccgccgggggttgggcgcgggcgccaggcccagctcctctgggccgccccaggcctccatgcgatagccgccccccgtgcccggccgccgcagcgcgtgcaggggcagcgtgccgcggggcaattccaggggccggcgcttcaggtaggcctcgtccagatccttctcggctgcggggagagggggaaaagccacagccgtgggtcccctgcgcatctagagccctccccctcccacctcgtcacatcccgctcctatgctccttgtgcccccacaaggatcctgggcatcaggctagctgtgaggccaaaatgcagattcccaggcccagcccacaatgctgggtcagtagatgtggaggacttcctcttcttcccccccgcgccgcctatcccttcttttgggagtagaacccaactcttgcttttggggaaccactgaccccctctcatcctgtagcaatgtgattcacacttggagttgtgacctgttaggttgtgaagttgattttgcgggtagtgagcagcattttgaaaaatgaaatcaaatagaacagaagagaaaactatcagaaagtgtttatgtaataagggaatcaggggtaagtgttggttcataaaattcttactgcagacgcgtgtgtgtgtgtgtggtgggtgtgtggtgtatatgtggtgtgtgtgtggtgtgtgtgtgtggtgtgtggtgtgtgtgcgtgtgtggtgtatatgtggtgtgtgtgtgtggtgtgtatgtgggtgtgtggtttgtgtgtggtgtgtgtggtgtgtgtgtatggtgtgtgtgtggtgtgtgtgtgtgggtgtgtggttgtgtggtgtgtgtgtatggtgtgtgtgtggtgtatatgtggtgtgtatgtggtgtgtgtgtggttgtgtggtgtgtgtgtggttgtgtgtgtatggtgtgtgtggtgtgtgtgtatggtgtgtgtgtggtgtgtgtgtggtgtgggtgtgtggtatggcgtgtgtgtgtggtgtgtgtggttgtgtgtatggtgtgtgtggtgtgtgtgtatggtgtgtggtgtgtgtgtatggtgcgtgtgtgtggtgtgggtgtgtggttgtgtggtgtgtgtggtgtatatgtggtgtgtgtggtgtgtgtggtgtgtggtgtgtgtatggtgtgtgtggtgtgtgtgtgcgtgtgtgcatggtgtgtatgtgtgtgtggtgtgtggtgtgtgtgtgcgtgtgtgtatatgtggtgtgtgtggtgtgtgtgtatatgtggtgtgtgtggtgtgtgtgtatatgtggtgtgtgtgtatatgtggtgtgtgtatggtgtgtggtgtgtgggtgtgtgtggtgtgtgtggatggtgtgtatggtgtgtgtgtggtgtatatgtggtgtgtgtgtgggtgtgtggctgtgtggtgtgtgtgtggtgtgtgtgtagtgtgtatggtgtgtgtggtgtgtgtggtgtgtgtgtatggtgtgtgtgtggtgtgtgtggtgtgtgtggtgtatgtgtatggtgtgtgtgtgtggtgtgtgtgtatggtgtgtgtggttgtgtggtgtgtatgtgtgtgtggtgtgtgtatggtgtgtgtgtatgtgtgtgtgcgtgtgtgcgtgtgtgtggtgtgtatgtgtgtgcgtgtgtgcgtgtgtgtatatgtggtgtgtgtgtatatgtggtgtgtgtgtgggtgtgtgtggtgtgtgtgtatggtgtgtatggtgtgtgtgtggtgtgtgtgtggtgtatatgtggtgtgtgtgtgtgggtgtgtgttgtgtgtgtgtgtgtgtgattgaaatattaaaggatgagatttagtttaaaagaatccatcaaggtcagatgaggtggctcactcctgtaatcccagcactttgggtgattgaacaggagggtcccttgagcccaggagttcaagaccgacctgggcaatatagtgagactccatctctacaaaaaaaaaaaaaaaaaaaaaaaaattagctaagcatggtggctcatgcttatagtcccagttactcgggaggctgacgtcggaggattgcttgagtccagaaagttgagcctgcagtgagccatgattacaccactgcactccagcctgggcaaaagagtgagaccttgtctcgttaaaaaaaaaaaaaaggatccaccaaaaagtggggtggagggaggatagattaacaaaatgtggctaattattaaggctgagtgatgggaacatgggactcattttataattttctctactcgcatgtatgtttgcaaatgtccgtaataaaaagtttcaaagatttcctgtaattaaaaatatacacatgtgtgtgtgtgtgtgtgtct[132 bp omitted]gaaaccccgtctctattaaaaatacaaaaattagccaggagtggtggcatgtgcctgtaatcccagctactctggagactgaggcaggagaatcgcttgagcccaggaggcagaggttgcagtgagccgagatggtgccattgcactccagcctgggcaacaacagtgaaactctgtctcaaaaaaacaaaaaacaaaatgaaacaaaacaaaaaacgccgggcatagtggctcacgccttaatcccagcactttgggaggc[134 bp omitted]aaggcaggagaatcacttgaactcggcaggcggagattgcagtgagccaagatcatgccactgctctccagcctgagcgacaagagtgagactctgtctcaaaaaaaaaaaaaaaaagtttctggctgggtatggtgggtcactcctgtaatctcagcactttgagaggacgaggtgggtggctttcttgagcccaggagtttgaggccagcctgggcaacacagtgaaaccccgtctctacaaaaaatacaaaaattagccaggcatggcagcacgagctcttagttccagctagccaggaggctgacgtgggaggatcatgcttgagcctggggaggtagaggctgcagtgaatgatgatcatgccactacatcccagcctgggtgacagagtgagaccctgtcttgaaaacatagtggtaataaagaagaaaaagtgtttcctagtgaagctctcagtttaagatgtttgaaggctgctccactgtcagcaatgggccacggactgcagaatgtccaatgagagtcacaggaatgggttcagggatgggcatgtgacccagcttgcaccaatggcatccaggcctgggattttttgccggaattgttgggagagactcttttctgccagggtccctgagctggtagaacggcagcctgaacatctgcagggtggtcgttgccaccacgaggggagactctctgaaaatgaggcccgccggtggcgtagagagctaagagacagctcttgagcccccaaaacagccacatcgcaatctggtgacctgtagattttccatgatcaagtcaacatgtttttttcctttagctgaagtagtatttctattaattgcaagtccaagtcctgatgaacaccataatatgtcctgggaggggagaccagaaggttgcattaaaaaaaaatcagaagtgattctgatacaaaagtaccacaggtaattccagaacgaacttggagtaaaacctgggagagaagctaaaccattggaaggctcttgggccactgtccacggtcctgaacccaggctctggccccgccccctccccttcaccgccgcgctgcccttgccaggactcacccagcctcttgagggaagagtagcggttcagctcggatttcacggcagcctcgtaggacgggggcagatgcgagaggttgtggaaggaccgagagcaggacagcgtggagtagtgcaaggaggggctgggcggcggcaaggctcgccagtctgggttagagggggcagggccagggtcagtcagcttcctccctcagacccaggagtccaggcccccagcccctgctccatcagacccaggagtccagaaacccagcccctcttccttcagacccaggagtgcaggcccccagcccctccacctcagacccaggaattcaggcctcagccccgcctccctcagacccaggagtccaggcccccagcccctcctccctcagacccaggcgtccaggcctgcagcccctcctccctcagacccaggcgtccaggcccccagcccctcctccctcagacccaggcgtccaggcccccagcccctcctccctcagacccaggatccaggctcagccctcctccctcagacccaggcgtccaggcccccagcccctcctccctcagacccagcagttctttggggagttagaaatctgagattgtagcccatcagttccagcagttcaggctccctcttctcaccccagcccctctgctcaggagacgggcttgatgctggggaagagggccccaagaggggggtactgggcatttgtcagcacccactgagtgcctggccccaggctccatcaacaatgtgggagagagatgaccacttttggcatccacacgaggaaacaggctcacttggtgacctggccagaccatgagcgccatgaggactgggctcacaggggtctcactcctgctctatactgggcacctggcatggctggcccaacacaaagggggaagggaaggaggcctgctcttttccgcagccgggccctcttccgcacccagtgtggcggcgtggtgcttggggctgttgacgttgaggtgcaggtagctgtggtgcagattatctggggggaccgagaagggagatgatgtcactgccatcactgactcccagctggcaccgtggccctgatctctgggaaggactctggccccaaggtcggccccacatgcaggacctcgttagagctccacagatcaacccatgccattggccacatgggggaaactgaggctgggggtcttgaaggtggaaagtgtgggcacaggctcagggctgggtaagtggtctgtcccaagttcttagcacccccccccctggtgcccaggctagagatctgagggggtcgccttgctacctccctccacctcccactcatgtccacttggttccttctgacatctgaatctctgccctgatgtgtcctctccctcctggatcaccaaagcagcctctggccatccagcccatccatctccatgatcagcctcaccgaggtaactgcccttccactgctcaacagccttcccattggctcaccatcacccacgggacaaagttgaacccaggaatggtgtttgaggcttcaaaacctggacccactggatgtctgcagccccatctcccatcccttccctcaagccgcactgctctctccagtgagcccagcgtggtcctgccacagggcctttgcacatgccaccatgctgttctcactgccttgaagcccttcttcccatctgcctcaagatccagctcagatgtctcttctcctctccacccctgatcccagctccgtccttgtcctcttgctgcctggaccatcatcccagcctcctcctgggcctctttcctctcatctctgccctttgcatgggttccagaggaccggttctaccacccactgctggctgtgttgctcctctgctggaactcctccgcagctctccatcaccctcaggacggaggcggagttcctcagcccagcctggcgctcaaggccctctctgaggtcaccaaccaccctctccctggcctcaagtctggtcacctcacaagctctgccacctggagcttcccagccccagtaactcctctcctcctccaggcctttgctcaaatacctctccctcggagaagcccttctgacgcctctcctcctccaggcctttgctcaaatacctctccctcggagaagcccttctaatgcctctcctcctccaggcctttgctcaaatacctctcccttggagaagcccttctaacgcctctcctcctccaggcctttgctcaaatacctccccctcggagaagcccttctgcccccaaaccagaccacatcttctcagttcccctgacagctccttggacctctccactgatgcattcatcataaattataataatatagatcatatttaaatgatatacaatattaaatatgatatatcatattttaaatatataattatatatatttaacaatagcaacagcccacacttacatagtatttttttctgtgttacacattattctaatcacctgcctcaccaattcatttgctcttcaccataaccccatgaagtgagtattgttatgtttcttattttatggatggagaaactgaggcccacagaggtgaggtcacttgccccaggtcacacaatggcagagtcaggattcaaacccagtcggtctggctcctgacaaattcgaatttggtagttgtgcccttgtgtgtagttggctgttaggtggtctgacaccgagcgcaggggcttgagaatgtctaaacctacatcaccaaggtgcccatggagccccacccaggggggtccacaggagggcaaggagagggtctggctctctacggagttcctagcccccgtccgcctttcgcagggcaggacccggcagtgcaaggcgggcgtagggggtgagggcgggtcctgggcgatgggggtggagccgccatggagggcggggctacatgatgaaggggcgtggccagagacggaggctgcgccggatcccacgttccactcaccgaggttgggggtcttcacggtgttgtagaggttcttgggcgtcctggggggcatgctgtcgggaccgccgatccccggggtcagggagctgcttcgggcccggtccgggcgggtcccaggccccgcctgatgtctcagaatgtccaccagagctctaaaggtggcagagaggtggtcaaaggcctgggggctgagggtggcaggggtaccaggaaggcttctttccgctccctgctctcgcccttgggtaatctgtcactcagcctgcctttttcgccattggccacgcccctttctcgttggccacgccccctagaatgaccccctttctcaggccacacttcctgcttgaagcgctgctgccttaactcgtgtggaagccatcgcttctgtggtccctctcacttccctgtgggctcgccccaccctgaatctgggaccccattcccgttccttttgcagccttccccatggcaacaaagggtgctccatttacccagtgatgcggacctcaaacattaaatcaccttgactcttctttcccccaccttcatacctttcagcaatcctacggatcgaacctccaaaacatatcccaaatcagaccactactcaccacctctgcaatctctcacctggatcattgcaacagccccctcacgggtctccccactcccaccctagccccgtacactccagtctcacgcgcagcccgcataatttaaaaaatggacagatggcatcacgcccgagctcaggaccctgcagtggccccatcacacttaggataaacccgggcccgcctacttctcctcacctcctgctgcccaccgccgccagctgcacgggcgcttccctgccctgcaggccaccgagggcctttgcacgcggttcccctgcccaaaacctctcgcccacagatctctgcgtggttcgctccctcccttcgggtctccgttcagaggccttttcggatcacttcctctaatccagcgccctctctctcaacactttccgctgattttcttcacagcagtcatctaaaattacactgcacatgcttacggactgggccactgatagttaatgagcccttaccgtgtgccaggaccctgcacgaatcaactcagttaattacaatccgaataggtggggacgatgattagtctcattgtgcggacaggaaactgaggaacagagacgttaagcaactcatccactgtcacatagcctgtaggctgtgaacttggatttggaagtcaggcttttccaccagggcagagaccttgttttgttcactggtgtatccccagctcctggcccacagaaggtgctcaagaaatatgtgtcgaatgaatgagagtctgggcttctccctctccctgcatcactccgcaacagccgggccggctctggcgcgactttctcagcccctgcccaccttcagctacgccggcggccgccacctgggtctctgaccaccacgccctatccctgcagcccctcctcctcggatggctccacctcccttgctgggccccgccccaggctcgcagtcctcccgcccgagagcacacgcacctgggcacgttgatatcccggtgcgcccggggcgcacgggacgccttgctgaaggccactttggcgccgacgcccacggccagggcgaagctgatgaccccgcacacgacgtaggctgtgctgcccccggggccctcgcccccgcggcccccggcacccccagtccggcccccttccaaccacccggcctggccgggccctggccccccgcccgcacccccagcgcccccggcgcccccagctagcggcggcggcgtggtggcccagcgcggcgtgtcgtagttggagcaggaggcctgcgccaggcgcatgtgacggtgctcacagcagaagcggtagtggcaggtgccacagcagaagcggtaggagccggtgctgcagttgaaggtggcgtcgtactggcccatgacatcgtagtagccgtggcagagctcggcgggagggggcgcccgggccgccgcgcccgccccgcccgcggggccggtcctggtgccgttggcgcctgggctcgccgcgcccccgccgcccgtcagcgccccggtcaggcgccgcaggtgcgccagcagggcgggcagcgggcccgcgggctcggcgctcgtggcgttggacgggcgcgccctggcctggccggcgctagaggccaggagtacgaggagcaggagggccggcatggggcttgcagggggtcgcactgggccgccaggctgcggggagaacgagagcagaggttggagcgctgggcgggagagaaacggtcagagggtgagaaacgtagagatgggtgggcagagaggctggggagggcgggcggggggcggcagagtgtggggagcaacaggcgccaggaggcaggaagggcggagggagctgagctgcgtgggcccaagttggccgccccacgcgcggtgggcgacgatgggagagtaatggaaacgcgcccgggcacggctgggggagagaaatgagcatgggcggacagaaccgggatcaggcgagagatgaatgcgggagaagcgattgggagggtcgacagacaccagaggggtgtgcagacattaggacgaggagcgaggcgaggcgcgatgtaaggagaagaaacgggggcggcgaagaggagagggcaggggaggcagctggagggaggcgcgcgaaggggaggggagggtggcgaggggagtggggaccgcggagggagggaaggaagcgagacagatgaggggtgggtgggaaaggaggagtcagggagacggggaaggagggagaaaagaaggggaggaggaggagggggaggagagggagggaggaggagagagagaagttgagaatttgagtttatagaccaggcaagtgggaagaggcagtgcacggtttttcaacactgacattcggggaccgatgctgctttgtggtgagcgcctgtcctgagcgctgtaggatgtttagcagcgccctctccatgccagcagcaccacattcccccgagttgtgacaatgtaagatgtttccaggcattgccaaatgttcccctggtgggaggaggccacagctgcccccgtggagaaccactgacttacacccctatggtcctcagtgccccgaaatgccaatttctctcccttagttagatctgataatcaagggatcttaggtgccctccctccctccctctctctccctctctctctctctctccctggcatgcacacgcacacacacaccactgttacggcgtcgggtttgaagggtctctgtccacagctgaaccacaaccacagcagggtggttcccctgccgactggacctcctgccagctgcctgacactgacaggctcttatctaagctccctgtgccccaagtcccccatctgtaaaatggggataaggatggttatctctgagtggtcaggaggatgaactgagggaatatgtgtaaagagcttagaacagtgcctggcatattgcaggtgaaatatgaaagtgtttgctgctgctgctatttcagaagggagatacaggctgagaaagggtcgtccgggtgcggcggctcacgcctgtaaatcccagcactctgggaggccaaggtgggcaaattgctcaagcaggagaccagccagcctcgccaacacagcaaaaccgtgtctttacaaaaaaaaaaaaaaaaaaaattagcccggcgtggtcgtgcgcacctatagtcccaggtactcaggacgctgaggtgggaggataacttgagtcccagagatcaaggctgctgggagctgtgatttcaccaccgcactccagcctgagttgacagagtgagaccctgtctcaaaagagagagaaaaggtgatgcagaagagaggtgggagttggtggtggtggtggtgggcacgtcttccagctgtttctatggcaacagtccagccaagtcccagacacgcccacccccgtggacctagagggatgatagaggtgggaaggatgcctggcctcgggttccgggagaaggaaacgtctgagctctacctgcaggaggaaccccccaggggtctggggtgactgcccacggagtcttacatttcctctctgcaagaacctgatctgaacagcccctgccctgagctagctgccgagaggctgccatagagcttcccaggagcaggcatgatgcgcggggtgtgcattcgttctgcaaatcttcattcaataaatgtctcctgagcagcctccctgggctgaggatgcagcagtgagtaagcccacagggttcctgcctttacgggggtttacgtgctagtgaggggggacagtcagcagatggacacaaatgaatgggacacatgttgacgccaattgtgaagaaataaaaaggaatgatgaaggaagccgtgaagaaatgaaagcagcataaagggatggagggggtggatgggattgagtcaataaatatcactcggtgttattttctattatatgccaccatccatcgtgtgtgtgtctagggaccacaccactgtcaacaacattgctgctggtggggatgggcagagggttggaaggtgaaccttccagagcctcagtgagctccatcgccctcctgcttggggcctcacctttccttttcagctccagcttggacccctcccctgactcggtgctagaataccccactgcccactggacacttcctcctgggtgtttaatgggagtcttagaagtggcttgaccccacactgt[132 bp omitted]acttgcaagaccagcttggccaatatgacgaaaccccgtctctactaaaaatacaaaaataactagccgggcatggtggcgtgcgcctgtagtcccagctactcaggaggctgaagcaggagaatcgcttgaactccggaagtggaggttgcagtgagccgagattatgtcattgcactcactgtactccagcctgggcaacagagtgagactccgtctcaaaaaaaaaaaaaaaag[147 bp omitted]gtggcgggcgcctgtagtcccagctactcgggaggctgaggcagaagaatggcgtgaaccccggaggtggagcttgcagtgagcagagatcgtgccactgcactccagcctgggctgacagagtgagacgtcgtctcaaaaaaaaaaaaaaaaaaaagaagttaactaggattaccatgcacttccactctgcagtgtctaccccaaagaattcaaaacatgtgtccacacaaaaccttatccttgaatgttcataacagcaccttgcacaacagccaaatactgcaaacaatgcaatcacccattatggaggaacggacaaaccaacgacggcctacccatgccacagaatattactcaaccgtgacaggtaccaagggctgagatacaagccacagcatgcacgaaccttgaagacatgacgttcagtggaaaagtccagccataaatctcatgtagtgtatgatttcattaatatgaaatatcacaatagtcaaatccacagagactgaaagccgattaataattgcccggagctggggacaggaggatggggggtgaccgctaaagggtggccaggcttccttgtgtggtgaggaaaataccctggaactaaatagtggtgatggctccacaacctgatggatacgctaatgccaccgaatcaaacactttgagaatggtt[139 bp omitted]gaaacactgtcactactaaaagtacaaaaatgagcccggcgcagtggcgggcgcctttaattccagctactcgggaagctgaggaaggagaatcgcttgaaccccggaggctcaggttgcagtgagctgagatcacaccactgcactccagccagggtgacagcgtgagactccatctcaaaaaaaaaaaaaaaaaaaaaaaaaaggaaacacgtcaaatggcatcaaccactcccctgtccgcattctggttccctgtcacacctggaataaaaccccaactctgccagtagctcctcttctcatcctttccttttcccttcataccttccaagttcatgctcaagacgctccaccttcctgcctgtgcacgtgctgtttccttcgtctgggagccccttcctttccacagatcctgctctgacctgcctcctttctcccttccttcagggtgtccctagcatgtcatttcagccagccttcctgtcctagcggtaacagcagccccagacatgctcccaattcctcacttgctttgcaactttcatagctgtcatctctgctggccacatgtgtgtgtactgacacactcatttcagatgaggacgctgaggttccgagaggtcacatcatttgcctgagacccaaggtgcccaaagagtggggctgggctttgaactcaggtctctgagcactgtgacctgtacagcatggatgcctttttcccccacacagagacacatcccttccagaagtggcacatgcatgcagcactgcagattccttcattcattgagggctaccatgtagggttgggcaggtcgtgcactgcacaagggggtctggctgagaggctgaaatcctgctgggctctgcttcccagggcgtgtgccagtggggctgcatccatttggggtaaggagtgccccttccaagctcacacaagggtgccatctgcgtgccaaaccacagacctgggagagcggattgggcaaggtggggggtgcctttgtctcatctgcacagaggctgctgtatgggctggcagttctgctcactccgcattccgtgccaagcctccgccaggctccatggacacgatttctccctctgctgacagagtcccactggctgctccaactgcacgcacgtggtgcacacacccaaggagacacagctctaggccattgacaactccagcagggggacagggagggagagcaggagcagtggcgcacctcccctcaaactcagcgatacacgcagacgcaccacacacagaccacacatacacacacacacacaccacacacaccacacatacacatacaccacacactgaccctccacaccacacacgccgcacagaccacacatacacacacacaccacacacacaccacacacaccacacatacacacacacaccacacactgaccctccacaccacacacacgccacacagaccacacattacacacacacgccacacacacacaccacacactgacccccccacaccacacacacgccacacaggccacacatacacacacacaccacccacagaccacacaaacacacacaccacacatacacacaccacacacacacacaccacacacaccacacatacacatacaccacacactgaccctccacaccacacacgccgcagagaccacacatacacacacacaccacacacacacaccacacactgaccctccacaccacacacacgccacacagaccacacatacacacacacgccacacacacacaccacacactgacccccccacaacacacacacgccacacagaccacacatacacacacacaccacacacacacaccacacacaccacacatacacatacaccacacactgaccctccacaccacacacgccgcacagacaacacatacacacacaccacacacacacaccacacacacaccacacatacacacacaccacacactgaccctccacaccacacacacgccacacagaccacacatacacacacacaccacacacacaccacacatacacacacacaccacacacacacaccacacactgacacacgcacacaggccacacatacacacaccacacacacacacacaccacacaccacacacacacaccacacactgaccctccacaccacacacacgccacacagaccacacacacacacacacacaccacacactgacccccccacaccacacacatgccacacaggccacacatacacacacacacaccacacacaggccacacaaacacacaccacacacacacacacacacaccacactgaccccccacaccacacacacgccacacagaccacacacacacaccacacgcacacacaccacacacagcttctctacccctcctggtcagggcagcacctataggtgggtggagagaggacgtgcacctgcagacacagcggccccatccagacactggatgaattcttccctgacctcacacaaagctgcgcagagacactgccgaacacgctgacacagagcacagggcacccagatagtcccagacacaacacgaaaggacctggtggcactcctgtggcctcctcccggcacacggacgcacatacacaccactccacgtggacacacaacacaaacatgggcttctgcacatttcaacccctacacactgggaccacttacagctctgggacaggaccagggacctgccccacctggctccacgtgggcccgcgaccacacacatcacagctcacagccacgcaacctcaggggcgcacacacgtgtgcaaatacaccctcaccagcaatggagagtgtggaaggcgccatgtgacacctccgccccacacccgcccccacctcggctctcacgcacacaacggcgctctcctcctccacagctgagggggaaggggcccgggaccccaggcttcacgtctgcatcttgcatgccccgctgaaccccagctcaggacctgacagacacagatgtggggacacaggtcagagagccagcctgggcagggtccctgggcttctgggagctcctcccccaccccccaccagccccctgcccagctctgtgctgcacactccacctgctgcgtcccctcccaaccctcttggctgggggctgggggccaggatcccagaagctcagagaaagggacagggatactgaaggggaaacagaggtcctgggagaggggacagagagccaaaggcagggcagattgtgtgtgtttgagagagaagggggtacagagacccagagagagggggacagagacccagatagagggacagggacccagagagatgggggacagagacccagagagagggggacagagacccagagacggggacagagacccagagagaggggacagagactcagagagacagggggacagggacccagagagatgggggacagagacccagagagagggggacagagacccagagacggggacagagacccagagagaggggacagagactcagagagacagggggacagggacccagagagatgggggacagagacccagagagagggggacagagacccagagacggggacagagacccagagagaggggacagagactcagagagacagggggacagggacccagagagatgggggacagagacccagagagagggggacagagacccagagacggggacagagacccagaaagacaggggacagagacccagagagagaggggacagagacccagagagagagggggacagagacccagagagagagggggacagagacccagagagagaaggggacagagacccagagacagggggacagagacccagaaagacagggggacagagactcagagagagagggaacagagacccagagagagagggtacagagacccagagagagagggggacagagacccagagagagagggggacagagacccagagacagggggacaaagacccagagagagagagggacacagacccagagacagggggacacagacccagagacagggggacagagacccagagagagaggggggacagagacccagagaggggacagagacccagagacaaggggacagagacccagagacagggggacagagacccagagagagaggggggacagagacccagagaggggacagagacccagagagagacgcaaaagagacgggcggggggcgggagacaaatgctcagaggggacgcagcgtcctagagaagtggggttcagagaccctgagaggagagagagccagagaggggaggacctgacctaccgaggggacagacgcccgagagagtcggcgcctctggggtctcgggagctgggctggagtggggtccgcagggggtgggtggggggctgaggggcgcagtgggtatggagagagaggccagggctgggccgggcgggcgccggtccgagtgcgaacggtggagctcctctggggttgacgggtcggtttggggtaggggtgtgcgttcaagaggaggcgggcccgggcgggtggggaaagcccagagggaaggggcgggctcttgctggagggcgcggggaccccagttccgggcgccaggggcggcggggcggggagaccctgggggctgcacgggggcgccgtgcctcgcgggccgcggggaaggcagggaccgagcgagggaggaggaccctcccccgacccgcagcccaggcggcggccggtcccggcgcccccgcccagatccctgcgccgcccggcccgcgtgcttgtctctgggtctctgcatcttcgcgtcccggggcgccccgtccacgcctcctcccggacccccgcctcccccgcccgtctctgtctctagcgggggtctcagccctcgtctgtcgctgcgggtctcctcgcatctcggcgtctctctccgcgtctctctccgtcccggcgcctgtgtcccgggctgtccccagctccgagcctcagttccctgcgcgcctccatttccctccttcccccgcccggtctccgtcacccctctgtctccacatcccgcttgtctctccttcctggctccacgtctctttctctgtcccaggtttgctgtcgtctgatctctgtctgagtgtctgtgtctccactcgcccccgacccggccccccgagccccctcccgggtcccccactcccattcaggcccgggttggtggggtgggggggcgctgcggcgggagctgtgtgttcccagcgcaaaatagactctcgttgccatggcgacgcgcgcggggcctcggagacgcgaggcttcgggcttggggggtgaggaggggggacacctggatccggaaggcgggggccgggggcgccgccgcccggtcccaggggctcctcctagatccctggggagagggatgctgggcgctccgacgctgggggccaggggaccggaccttctgggaggggtctgggctcccagggtcggcggtgggggctccgattgcccaacgcggggcgggctgactgacagctctgacgccggtgtctctgaggactcaggggtggcctctcaggtctccaaggttggggaagaggcaagggctgcaaatctggaacggaggagctctccctgggggtctgcagattccaactcctagatctgcagaattctgggagcccccatgtgggtcccggaactcctgcgtctgggggagccgggactacaatgctttcagcccttccttccatccgtccatccatccttccatccatccatccacccatccacatggctgtgtcttccttcctcccgtctccatgtccccttgcctcagtttcccttccgcacctgggtgcggtctcgctcacctcgctttccggatgcgggacccttggggagccgggggtggcggcgtggggggcggccggaggcggcggcggagcgcgtgtctgccggcagctgggctgggcgtgcgcgcgccggctgggggcgaccccggccgcagttctcctccgagcagatgcgccgcgtccgtgcagatgtgtcagccgccagccctcgcctttgcctcgcgccgagaagaggcacctccccccccccacctgctggggaccccgctttctccctcctgcagcccccagtcgcccccgggatcccccccaacccaagaatggtttggtccacagccacatatatgtttattctgcgagtccgtgtcccacagtctgagactcttcttcccctccccttcccgccccgtgaagtggcccggggccgagccccgcctccatcttggctcagccaattcccacccagtttccaggagtctcatttgcatttccgggagcagctgtccaatgggaaggcagcaccctgccccccccacaagggggcggcactcctggtggatcgcaccactcttgggatccagggatggggggaacgggcttccactgaggtccgggtgacaggagggtggtcttccctcaaggcagggttggagttcagtggaggagggagttctggccttggaagaggcccagcagtccgctgtctggggcgggctccttgatgagtttctggatctgtaagggcagggggcgatgggtcaggaagcgtctagggtcccgatctccatggatgacaaatctgagggacacctctccgtcttcatctctcggaccttctggctagcagctgcccaagacaacactccctcttctcaagacttttcctggggcctccctttcattacacgtgactggttgagctcctcactgcctgccatcttggtgtgctttgcgggcttggaccactaagggtggacagctctgtgctggggcttcctgtctacaccttcctcttcttaagtaacctcatttctcccatccctcttctgggccctcagctcacaaatccagcctggactttgcccctgaactcgactcatctatctaactgcctcttagatagacatgagcaaccaaccgcatttcatccatcagcaagtcccagcaagtttatctccagaaaataaaataaataaataaataaataaacaacaacaacaacaaaaaagcctgcatcccccctgcctcatcaccgcttgcctgggcgcccaaattaacctccttactgacaggtctccctcctcccctctatgccacactccctaatccactggtcacacagggccagaaagaactttgtaaactgccgatctgatatggccagctcccctgcatcaaaccctgatggctgcccgtggctgaaatctcaaacctctgggctctgactcctgcgtgaagacaggctgctggctcctcccgcgtggtgctcaccctggcctgctacagctcctcaaagaaagctcagtccccctcccctgggaacactgtgagtgcctgatgcccccttccccggcagctcagaattcagggccacctctgccactcttgctcatccctctgcaactcctgccccagctgggggtcacaatgtgtcactgaacatggattgctgcagactccagggctcaccacagtggctggcacagagtgggtgctcggtgaatgtcccacagagctgaactagaaggaaggtaaggagcagacctgggagggcctgggaatgtcaaggtctggggcctctccagcatcctgagggccaatggcttgaagcaggggggcccagtacctggctgaccccggtagcagggtggccagtggagtctgagaaactggaggaggggcacccgggccggaaggggcagaggcggaggagatggagagttggagatgggtgtggacgggtcaaggggcttctatctagagggtctctgctgacctgttcttccccagtgtccgcctggtcactccctccttcagttcattctaaagtcacctgctccaggatgccccccagaccctccaatacaaaccccctcctctgtgccctgaccctctggattgcctcccccattttattgttctctgtggcccttatggtccatctgtgggctcctttcatggatttatggcagtgacagtgaccagcagcctcccctccaagaacctggctccccctggaggcggcagcctgctggtgccgagatgtattctcagagcccaaagacaagacctttgacagatgcaggggaggtgggggcggccaggcgggcattacctccttgaactgggggtggacggcatcgcccacaagctgcagaatgagcccttcgctggtggagaggaaggcaccactctgtctcatgcgggccagagccaccagccggtccacctggctgtgagtgggagggagggagggaaggttggtgtggacgccgcagtctggacacccagacacgcaggcaccctggtgggaatgccgcctgtggcccttcctgggagcccctgatggcccccacgtgcacccacccaggcaggggccctctcacctgcgtgaggagcaggcgtccaccaccacatggacctgcagcccccggtctaggaggtccagggtcgtgttctgtgggtagagagaggtcagggccaaccccggataagaacgggggtcctgggtaaggaattggggatggtgagtcagaattaggggcccagaatggggaggagggaggctcggatcagaggaaggggcccccaggtcaggaggggatccaagataggatggggcccacaggtgaggagagagggcccaggtcaggatgggggtcctgcagggaagtggaggtttctggtcagggaaggaggttctatttaggatgggggtcccaggttagaacgagggacccctggggtcagtcagcatctcaccaagatgcaggcctgtgcctcaatgccacagagcagcacagagcgcagctggggccgactgtccagctcctgctgcagggcaggcaccatgctgaagcaggtcttggccagcggccgaaggccctcagtccccagctcgggcaccgtggggcccaggccttgtgggtactgctccgtcagcatgactggcacctcaagcagccgggccacctgtgccagtgatggggaagaaaggtcagggtctgagggaggaggggctgggcctggactcctgggtctgagggaggaggggctgggcctggactcctgggtctgagggaggaggggctgggggtctggactcctgggtgtgagggaggaggggctatgcctggactcctgagtctgagggaggaggagctgggcctggactcctgcgtctgagggaagaggaagtgggcctggatccctgggtctgaaggaagaggagttgggcctggacgcctgggtctgagggtggagggctgagcctggatcctgggtctgagggtggagggctgagcctggatcctggatctgagggtggagggctgagcctggatcctgggtctgagggtggagggctgagcctggatcctgggtctgagggtggagggctgagcctggatcctgggtctgagggtggagggctgagcctggatcctgggtctgagggtggggggctgaggtcataccttgagcatgcgggcagccactgagacgatctgtgggaagtaggcgatgttgtggcggaacttctcctgcatgtcacacaggaacaggacagaggatcctgggaggactcggcccaggctgggcctggcagccgccattttctgggggtgggcagagggacggtgggtcaggcccgagggctcctctcagtgtctccagctggcgtccaggtcctcacactcagagcctggcagggcccggggcaccttgccaaccttcttcccacctcaaggtctctgtgtctgctgttccccgggcctagaatgggcttctttcttatttctgtcctattcggcagggaggtgacttccttgggaagccttctgggccacatccacacgtggctccgggtgtccctctcctggtccctgtgttctccttgctgaggactgtgcacaacgtcaaggagtgcttcatgatcccggttaccatccgccccggttaccatccaccccagttactatcagtcccggttaccatcagcctcagttaccatctgccctggttaccatccaccccagtcaccatccgccctggtcaccatcagccccggttactatcagatcccggttacatcagccccggttactgtcagccctggttaccatcagccccaaaacggaggctctgctgggcgtcctcctgtgttgggccagcccactccccagggcctcctgaatgaagggtccaccctgatcctcaccctgctccaagaggaaactgaggccatattcttcagccataggaaagaagggggaccctgcacaggccacaacctggatagatctcaacacaaagaccacggagcgtgcgatcccgttttcctgaaatgcccagaacaggcaaatccacagacagaaagcagatggggccgggcgcagtggctcacgcctataatcccagcactttgggaggctgaggtgggcggatcagctgaggtcagttcaagaccagcctggctaacatggcgaaaccctgtctctactaaaaatacaaaaattagccaggcagtggcgggtgcctgtaacccagctgctcgggaggctgaggcaggagaatcgcttgaagcccaggaggcagaggttgtagtgagccgagatcacaccactgcactccagcctgggtgactgagcaagactctgtctcaaaaaaaaaagagactgggcttggtggcacacgcctgtaatcccaggactttgggaggccgaggcgggcggatcatctgaggccaggggtttgagaccagcctggccaacatggtgaaaccccatatctactaaaaataccaaaaatcagccaggcacggtggcacgcacctgttgtcccagctacttgggaggctgaggcaggagaatcacttgaacctgggaggcggaggttgcagtgagcagagatagcaccactgccagtccagcctggacaataagagcaaaactccatctcaaaaaaaaaaaaaaaagagaaagaaagcagatgattggctgccaggggctgtggccgggaggaattcaggttgactgctggggggtgtagttttcagtttgggatggtgaaaatgctctgggacttggtggtggcggctgcagaacagcatgactatgaatgccactccactgcattttcaaatggctgaaagggtaagttttatgttaagtgcattttaccacaattaaaaaaaaaaaagaaaagaaagaaaagaagagaaagaaaaaaaggacaggctggtgaagccacctggccagcaattcttttgcaggggaggaaacctcgacccagagggcccgttaacctgccctaagtcctgcagccatacagggcacacctgacttccactcggtcagagcgtctacgctgtcagagcgtctacaccgcaggggccctgaatcagcacgtcttggcctacgtccctgggaggcttgtgcttttgggtctccgagtttgctgcacaagtgagggtttgggctgggcttttgtctgcagctctctccccgtctgtgtgtacaatttgtttgtacttaactcatttattcattaattcaccagggaaatgggagaccctggaggctcattggaggcaagacagaaggtgttctgggaagctgagggaggcagggcactcaacaagaagctgctattttcttttcttttttttttttttgagatggagtcttgctctgtcacccaggctggagtgtagtggcgcgatcttggctcactgcaagctctgcctcccaggttcaaggattctcctgcctcagtctcccaagtagctgggattacaggcttgtgccaccatgcctggctaatttttgtatttttagtagagatggggtttcaccatgttggccaggctggtcttgaactcctgacctcgtgatccacccgcctcagtctcccaaagtgctggtgattacaggtgtgagccaccgcacctggccttgagctgctattttcaaagctgggtagttaggacactgttgttccttgtctttctttctctctctcgtcctggcctcaagcaaccctcctgccttggcctccctgtactattttttctttttgagacagggtctcatagtgtcacccaggttggagtacagtggcgcaatcatagctcactgcatccttaacctcctgggctcaagtgatcatcccacctcagcctcccaagtagctagagctacaggtgtatgccaccacacctggctaatttttgtatttttatatttttagagacagggtcttcctatgttgcccaggctggtctcgaactcctgggttcaagcgaacctcccgcctcagccttgcaacatgctgggattacaagcgtgagccaccgcgcctggcctattattctttgaacataatccatctaccatagcaaatgttttctatgtgcaccatatctcaagtttaaaaacgaataaatggttaaaatggtcaattttatgttgtgcaaattttatctcattaaataaaattgaatggaaactccctctgaaacaaaaccacagtgaattaatcccataattacaactgtgataagtgggatttggagggagtcagatacagcttggcaggggctgcagtgttctcctagagaaactgacgacagaaaaatgatcttttcacaaaacacaaagctattactcccctgtctcaaactgtcccctgacccccgtggattctctctgtcctcaggactaagatgcaggcgcccctttcccccccgccccgcactgctctgaagaccctccagcctcagcccagccactccctcctctcaaacagcccttgcggtttcctccccatggagtgaccctctcacggccactcatgtgctaactcttcctcccctgtgcaggaggcgggacctggacacccgggccccaagggatggttctgagggaaccaggagctggagagctgacaggtgggtcacaagggccctggagtctctctgctgagggcagtgaggagccatggaggggcagatctgggggccagcatgtccaaaagcctaggacaggcatgtggagcacccaggaactcccctctggcctggtaggagtgtgggtcacaacaactcctagggacagccgagcagctgcatttctcaaaatgatggatacacaaaccctctgacctcaaaagctgctcctaagcatttatcctacagacattcatgtgaaacgacacaggattattcattacaggactcttccccagagcaaaggagcagaagttaagtatcaatgtccacaatgagggtactggttacgtaagtcatgccataactatactctgttattcctcgcagccagaaaaaattacgaggaagctctttaagtaacaatacgaaaacatgtttgagagaagtgaaaaagaagcagaacagtgtgtatggaatgctcctttttgtgccaaagaaaaaagggagaggaaaatgtgtctgtgttgcctatatctatatctgctatctctggcaaacaagcaagaaacgggagactcaggcgggtgaaccaggcaccggggaagtctgtaggagccttttcactgggtcctattctgtttcttctgaattctggacaatgtgcaacaagttgtctagtcaatactatatacaataaagggttggcataaagccaaaacccggcaaaactgatctatggcgtcagaagccaggacagtgactgcccttggaccacagtgatggaaacgacgacggcgggagatcctgggatgtggcgcatgtttgacttttttctttggatacttgtttacaccagggtgctccctttataaatatttatttaagctgtgtatttgcaaaccgttcgattttctgcgtttgtggtattattccagaaaaagtgttcaaaatgcaaaatacaaagatggcttcaggcccccgccgtgcggttgaactggaggcaaaaggccagagagcaggaggtcggcgctggggcccagtgggacaggggagagtcaggaaggggcagctgggacggtggggaaagtcggggagaaaggcccccagtttctggtcgagcgaggggcatgatctgaagattcataggggatcccggggaggggaactggtttttgggagatgaaaaattggggtgagggtgggtgtgtgagagagagagatgtgaaggggaggtctgggctggagagggttgggcgtgtcctgcggaacgaggagagattcagcctgggtggagggtacccaaggccaaagggggcgtggctggaggtgggcggcaacagggggcggggtagggccgttgatttccccacccggtctcggaaacccggccttggagcccggacttcctggctgtgtgaccttgggcaagtttctctttgtcttagcctcagttttctcgtcggagaaatggggattaaacctgcccaccccccagcgctgttacagaggcggcaggcgcgacccggggacgcttccaatctctggccagccaattctggcggggccaggtggagtcctccttctggtcctgtgaccttggcccgggacgcccaggcagagcctcagtttccccatctgctaggcggtaaggtcggtctccaaatagcgccagcagcgagagaggacttacccggaaggtgccgggttcgagcccggaacggcccctctgcaggtgaggcgggggcaccctcacctctcggctctcggacggccaccgctgaggcctcttgcgggcttcccagggctggttaccgtttcgttagggctggacacgtggcccaccccctgcaccgtccgttttccgcccacttgggcccagccgtccaatcgacactcatcatgctctgcctcgccgctctctccggccaatccgcatgtgccactgcctctgcccgcaatcggcgctcaccaactcaccccgccccctgcctctcaaccaatccgcatatgcagctgctttgctcccgccccagggggggcggtgccggcaaggctgtcagtctcaagaaaatgattagctcgcaaaggcgccgtgggggcggggcagcaggtcgttctgccaatggagagccgtagagggcgtgagtggcggccgacggggcggagtcgcgcggtggtctccgaaggctcagactctggctggagagagggcgtctcggccggccccattgcacagagcagaccgccgaggccgggagagagagagaggggtcttacctagagtagaggcatgtctgcggttcgaaacctggccctctctcaagaaacggaggcttacaaagatacccaagcactttccaggaaggggctggctgagggagcgatcaagtgaggaatttgacgcccccctgtcctttgcgctctgtgctgcctcagtttccccatctgtacagcacctgcctcctcgggtggtgtttagaataatttagactctgtgcttggaaatggaggttgagagaaagagagaatttcctatctgtcttggaataaatccaaactcctcccaattcatggtcggccttcctggtccgtgcagacctcgcctctcaccactccccctgctcactccgctccagccacaggggtctcctcttgctcttccctcaatgtcccaccgcagggcctttgcacgtgtgctgcctcagcctggaatcctaggactccccatggcccaaccttccaggctttcaaagcctttcctgaccacctggtgtcaggtagcccttccatcaggtcgctgtttttaatttttttgaaacatcaaaaaaaagaaaaaaattgctctatcacccaggctggagtaccatggtacgatcacagcttgctgcagcctcaacctcccgggctcaagcgatcctcccacctcagcctcctgagtagctgggaccacaggtatgcgccaccacacctgactaattttttaatttttttgtaaagatggaggtctcactctgttgcccaggctggttttgaactcctgggctcaagtgatccgcctgccttggcctcccagagtgctgcgattacaggtgtgagccgccgcacccggccttgtgttttattttcttttcagcactaactccaatctgaattggaaatgaatcttgctttttgaaaaatgcatggatatactcttttattgtctgttccccgccaaaacacacacatgcacacagaacagggagctccctgaggcaggggtcccgtctgcctcgttcacagctgaatcctcaagtcctagacctgggcctggcccatagtaggcgctcgatacatctttgggaataaatgacaggagagcagacattaggcagaggtgagcctgggtgagagtgaggggtggatgcccagatggggctaggcagaaggaagggggaaggcaggaaagcaagaagaggtggaggtggggcccctgggcccaggaggagacccctgaggcagtggtctgaagtgggggtctgggttggtttattttcccaggggctgccaggaagggagtggacaggttgggggctcctggagagggctgtagagccgtcgtggaggggcctctggcttgtcctgggttctgggctgggttgtgattggcctcatggggagctggtcccccaaccctcggggatcccctgagaatcccaggcacgaggcacctcccagcagtccacccaaccccagtcgggagccacgagatcagcctcttcccccagggcatgctggggaaggggcagggggccgcagaaatgtgggacctgcctcaggtccagctggcccaggtcgcgatgggacagacccggcgctggcaggggagcatcagaaccagaggaggggtcccatggcattgaggcacactctggggtgagcgcaatgttgtcaaagaggtcgagggtagaggtgtccagggcagcgagactcaggctggcgctggcatggggagcctcagtgggggccacagcacaggccactcccaggaagggggatggaggcggtgggggtggcttttggagcgagggtctctggggaggtgcctcctgggacaggatggagagggccaggcgctgggtggcagcctcaatcttggtgaactgcctgtaaagacagatgtgagcaggctggtctctaacgcctgaactcaagcgatcctcctgcctcggcctttcaaggtgctgggattgcaggcttgagccaccacccccggccagcatatttgcaagggtcacctatgtggtcgcatcacaccgtgctagttatttattttggtgattcctgaccgtccgccacccccatgaaaacacaacctccacgacagcaaggaactttatctgctttgctaactggcctggcacacagtaggcactcaataaatgcacgttgactgttgctggcatccagccctgggggctgctcctctctgtctgtacctggtctcccccagccaagggtgctggttgctccttcccctcttccccgtcccgtgcccaccttccccaccagccccctcacctgcagatctggttgtgcagaaaccttctgtggttgggccgcctcttggggggccgggtgcgccggggctgcagggcccgcagcatgtgggcggccgccccgctcacaaaggcacacagctcccgggggccgggctcggagaccccagggccttcggggaccccggggtgcatggccagggtggtctggagtaactccccacaatattgctgaccaaagcaccccccaaatctgtgagcagggaggggcaggggactctggaggcccaggcaccccgggctggggaggaggcagggctgggaattgggccaaggcctccccactgtgccctaaccctgtccccacctcccaggagcccgacctgaagtctgagggagcggcaggtgggggctaatataggaaggcagggaacagggaggggagggggctttctggggccctctaagtgcccaattagcgcatagttggacctgggatatggacctggcgtgcgtcggcggggggcagagaatggtgcctggagatggccaattaagggaacaaaggcctcgttcgggaggcgaggccgccagtaagtcaaatgcagcgattgagcgtggaggacccttaattggagccgtggggagggggctgggagggaggggagctgggctgcatctgcccacccaccctcagacacacctgtgcctccctccctctgctcagcccagcaccttaggaggggaaaccgaggctcccaaaggggctggtgcgggccgaggtctccagccagcaggaggggttggctcctggagggtcacccccgaaatcctggggctcatagaatcctgagcagcagagtgagggaggagagggggaagggtgtggcaggacgggaggggacgggagaacagggcgcagtctcccccagggtgttttattgaggcactgggacccctggtgtctgtgggaggcagaggttgggccgggtccccttgtttctggaagggtgttggccggagcggggaccctgggtctcaggttgggtaggggagcaccgggtgtgacagcctcagtctctgcttggacccccaccctcgggggtctgctctgggaagccaggatgtttcccgaaattgatgtaacaaatgaccacggctcagtacctagaaccgcacgcgctgattctcctgcctgaagcagggatttaaacctgacatcatgagtttgcttcccaggcccgctcactggccagcagcactatgggcaaggtcagcagttgaggtcctaccaggcctagggtgggggccagcaggcaggtgggggcatattgggagctggggctgagtgcagccagtgatgttgccagaggtccagtttcctgtcagcaggacatggtgagaccagctgcagtaggacagacagacacccagtgccctcaccagccatggcacgtacacgttgactgctacccctgccatgctcaacactaccactgtgctgaaccactgcacaggtggggctgctgggcctggtgtggctggtgtctgtgttggggacaccattggcctcccatgtttctctcgggtgtctccaagggtctccagcctcctagacagcctcttgtactctgccccttggtccctctgcctgccagctgtctgtgactcacactagccccattgctatctctccatctcgcccacccttgctcgttcctcttctgctcctcctggctttctgtccatccctgggttatccacaattctctcaactatcatctatctatcacctgcctatctatggatctatcatctatgtatgtgtgtatgtatgtatatatctatttttagagacagagtctggctctgccacccaggatgcactgcagtggtgtgatcctggctcactgcagccttgacctcttgggctcaaggggtctttccacctcagcctcctgagaagctaggattacaggcacctgccaccatgcttggctaatttttttcttttgtagagatggggtctcactatgttgcccaggctggtctcaaacttctgggttcaagtgattctcctgccttgacctcccaaagtgctgcggtcacaggcgagagccaccgtgcccagcctctctcctctgtattgtctctctgacttcatctctcccatttgtgttccggttcctctccctgtctctgtctctttcactgtctctggagtttctctcagtgtttatgttttagactctgaatgctcttcactgcctgtctctcagcttttctgtttctgtctctctgtcttccccagggcatggtgtgtgtgtgtgtgtgtgtgtgtgtttgtgcacgtgtgtgattgttactggatggtactgtgcagttccagtctcctggtgtccaaaacaaagaattggatgagacgcgcacagacagcaaaggaaaggagcaaacgtttatgaagcacagtattccactctcagaggggagagcggactgagctctccgagatgagatcagccccagtttgttacatttcatggccttttttttttaaaggactctttttaaattttttttttattttttatttttgagatggagtcttgctctgtcgcccaggctggagtgcagtggtgcgatctcagctcactgcaacctccgcctcccgggttcaagtgattctcctgcttctacctctagagtagctgggatcacaggcgtgtaccaccatgcccggcgaacttttgtgtgtttttagtagaggtggggtttcaccatgttggccaggctggtctcgaactcctgacctcaaatgatccgcccgcctcggcctcccaaagtgccgggattacaggcgtgagccaccgcgcccggccgtacatttcatggccttttatatgtttttcatcacttccttaacctcactttatctcttgtaagttagttgctcatccttgcctaatctttctttatctcttttgaccaaattgctcatctttagctttatttttcgtggccaaactgctactgcaagtccttctggcttattttccttatcctgcatgttccaactcactgcttcctcccttatttcgcatgtcctgcttctgccatttgacacgttttgcttctgcttaagctaacctatgtccaacggtccccttcgccccccgaatttctctgctattctcctgcctcaagatgtccgtgagtctggttcacgcctgtggtattgggggtggcctgaaggtgaaggtttcctgtcctgttctgctccaggtctcaggtacagagggaagggtccagggtcccttggcaagaggccgaagggagaagacccctgggtctctggaggatgggaagggaaggattggctctgagggccgggaaggggcccgccgccacgtggctggggtatgacctttgctaccttgatacacactttatcgtgtgtattcacatctggtagctcttatttcaaaatttgcattccacagtccaggggccaagagcaacatccgccggccagctctgtcccactcaggccggccagcaatgcacagggcggccgcctgcaggctgcggcctcgggactgtccaccagggggcgcccacccggccggtgctgggcggcccggctcaaggggtgcggcccgagaacttggggccctctcctgtctcctgtcattgagaacaatcaaccacagcagggagctggcttcatggggtctttgttgaggacctgcacttccaggtgctggaaggtcttccccagcctcctctcccctatcccagcccttgaaattctgtgtgtgttgggggtggatttagtcattcaacaaacatttattgagcaccttgctttactgagcagtggaggaggtgaagtcagagaagccgagggggcgcggggagcagacctgccgggctttgtgagccaggcaagggttgggctatgagggtaagcatgatggagaaccatagagggtttggggcagggtctaacccaaccttctttgcaggccttgctacagctggaatgtggagaccccaccctccaatccccctacaatctggatgggggtgtcagggccaggccaggaagccagggacaacccagggtgtgtccttccctgtccccacctgctcatctgctatctgctccctctcatcca[144 bp omitted]gcctcccaagtagctgggactacaggtgcccgccaccacgcccggctaattttttgtatttttagtagagatggggtttcaccgtgttagccaggatggtctcaatctcctgacctcttgatccacccgcctcggcctctcaatgtgctgggattacaggtatgagccactgcatgcctagtctttttttttttttttttgagacagaatctctctctgtcacccaggctggagtgcagtggtgcaatcctggctcactgcaacttctgcctcctgggttcaagagagtctcctgcctcagcctcccaagtagctggaattacgggcgtgcaccaccacgcccagctaacttttgaatttttagtagagacagggtttcaccatgttggccaggctggtctcgaactcctgacctcaggtgatccgcctgccttggcctcccaaagtgctgggattataggcgtgagccgccgcccctggaccccttaaaatttattataaaaatgtacagatggcagagtcacaatgcatcaccctggtgttcccaacccagacgcagaggggccaaccctgtcgtatttggttcacaactcttcttctgagagaaggcaggccttggctgcctgtgtccccccagattcagatgttgaagttgtaacccccatgctccagagtgagacagtat[132 bp omitted]gaaaccccgtctctactaaaaatacaaaattagccggatgtggtggttcatgcctgtaatcccagcttctccggaagctgaggcaggagaatcacttgaacctgggagatggaggtttcagtgagccgagagcacaccattgcactccagcctgagcaacaaaagtgaaactccgtctcgatgaaagaaaagaaaaggggccggacgcggtggctcagcctgtaatcccagcactttgggaggctgaggcgggcggatcacaaggtcaggagatcgagaccatcctggctaacacagtgaaaccccatctctactaaaaatacaaaaaattagccgggcttggtggcgggcgcctgtagtcccagctacttgggaggctgaggca[137 bp omitted]ggagaagggaggggaggggaggcaattaagttaaacaaggccattagggtgggccctaatgcaatctgactggtgtccttacagaagagattaggacacagacacacacagaggggccaccatggaggctccacaaggaagacaagcgtctgcaagccaaggggagaggcctcgggggaaagcaaccctcccgacaccttgaccgcggacttctgtatccagaaccgggagaaaataagtttctgttgttggggccactcagtgtgggactttgctatgggggtcccagcagactcatatatataatgagtgtattcgctctctacgctgtgtaagaaatagccactgatgcaatggctttaaacaacgtacattcattatctcacagttccgtggccaggagtccagcaccgtggtttatcttggtcctctggtcaggatcgctgcaatcctcgagtgacccagggctgtggtctcatctgaggttggggtccgctcccaggtttacat[136 bp omitted]gacccccgagtagctgggactacaggcgcccgccac[138 bp omitted]cccggcctcatttccgtgcttctgaggaaggcatggagccctgggttcacggccagcaggagaacctcagtgcttcccatctttgatctctaggtccagctttaaagagctccactgactaggtcagatccacccagggtaatcttcctgtattagtcagggttctccagagaaacagaatcaataggctatgtctgtctatccacccatcaatcaacctatacatccatctatttatccatagattgatctatgaggatagcgatagatatgaatagctacaacaatatagatacatctctccagaaagagagtgattagaaggtattggttcatgtgattatggaggccaagaagccccatgtttgctgtctgcaaactggagaaccagaaaagccagtggtgtagttggagggcctgagaaccaggagctgatggagtagattccagtgtgagtctgaaggctggaggaccaggaggcccgagggcaggagaagattgatgctacagctcaagcctgagggcagggatggagttccaccttcccctgaggctgaggcccacccaccctgcgggaggctgcctgcttggctcacgctaccaattaatctcttccggaaacactgtcacggacacacccagaatcacgtttaaccaggtacccgcgcatcccgcggcccagttcagtacatgcataaaatttaaccgtcacttttccccttgatgaactcaaagtccactaatcaggatcctattttttttttttttaatgagacagagtttcgctcttgttgcccagcctggagtgcagtggtgcgatctcagctcattgcaacctccgcctcccgggttcaagcgattctcttgcctcagcctcccaagtagctgggattacaggtgccctgccaccatgccctgctgattttttgtatttttagtagaaatggggtttcaccatgttggccaggctggtctcaaactcctgacctcaggtcatccacccgccttggcctcccaaagtgctgggattacagatgtaagccaccgcgcctggcctcaggatccttgattgcatctgccaagaccccccttgccttcaccatatcacataaccatcacatccacatgatgcaaaggcactcacacaagggcacgggtccctgggggtcatcgtagaaggtagcagccactcttagggaggaaatttagcatgcatctgtccctgtccgtttttgcacttaaaatggaggaaggttttacctgtacagatggaaccctgtatattgttgcttcctccagggagtctgccctggtttcccccaggctgcgtgaggaaggttttacctgtacagatggaaccctgtatattgttgcttcctccagggagtctgccctggtttcccccaggctgcgtcaggaaggttttacctgtacagatggaaccctgtatattgttgcttcctccagggagtctgccctggtttcccccaggctgcgtcaggaaggttttacctgtacagatggaaccctgtatattgttgcttcctccagggagtctgccctggtttcccccaggctgcgtgaggaaggttttacctgtacagatggaaccctgtatattgttgcttcctccagggagtctgccctggtttcccccaggctgcacgaggagtctcccctggctcccatgtcctgggcagcctccatgagtgcctgaccgtgcatgtgagacctgctcgataggccttggaagtgggtggactctggggttgggcacattcctggtccaaccacttctgggctgtaggaattccttcctggttacaggacactacatcacttcctggttctgtggcttggccatgagacttcagagggccttgccttaccccactgtgaaatggggatcacaccccttctgagtggagaggcccgttagcttggggccggctggggctgccacgggggccttaagagatgtcagaagggagcatcctggccaggtgcggtggatcccgcctgtaatctgaacactttgggagaccgaggcgggtggatcatctgaggtcaggagttcaagaccagccaaattagctgggcatagtggcaaatgcctgtaatctcagctactcaggaggctgaggcaggagaatcatttgaacccgggaggccgaggttgcagtgagccaagattgtgccattgtactccagcctgggcaatagaatgggactctgtttccaaaaaaaagaaggaagcatcctgagtctgtgggaggcaagggcctgccccctgggtcccctgttccgggggatggccggcaaccggtgactccctttgcccgtcccctccgccttcaacctaaaatgcatctctggttccttacccgacttgtttggaaaaggacgttttatttttcatcgctggccctgggaatccagtcattactccagatccctccttcactccctgaccccactttctggagagggagggaaagggagtggcaggtcccttctaaagccttcggctgatcctcctgggatgggggtggatggagaagaatctcccaagtgcgtgcagggcctctgggcggaagtgacagcacagtccccaggaaagggtgggtacctagaggggctgaatggtttacctggctggcagggggcagggctcagagtctgaggctgggcaaggaggctgatctagttggggtggggggaaccgtgcccccaaaacacctggtgcggggtgttgttggccagaaacagaaacgtctggggcctgcaggggtgcaggggtgtgcatccgcgcgtctgcttggtcctgcgtttgaggctctggaggtccccttgctgccctggagctttatcccccgctgggcttttccctgcagcactgagcagcgggtagtctgtcttctttgttaccactgcatgccctgggaggttttgtgagctcactgggatggtgagttttttattggttttccccctccacattgctatgacccagctcccagggcaggacctggggtggagccctggtctggactgtgggtgggagcgctgctgggcctggaacagctgcagctgaggattctgtgtgatcttatccatgtttttggctatttgattctgtttttgtctgtttgtttgtttgagatggagtcttgctctgtcgcccaggctggagtgctgtggcacgatctcggctcactgcaaacctctgcctcctgggttcaagcaattctcctgcctcagcctcctgagtagctgggactacaggcacgcgccaccatgcctggctgatttttgtatttttagtagagttgggggggggtttcaccacgctggccaagctggtctcgaactcctgaccttgtgatccgcctgcttcagcctcccaaaggcctgggattacaggcatgagccactgcacccagctgattctgtttacttgtcagcatgagggacctgacaacatcccttgaagggctacacagatgttccggggggttaggagacaaccccacctccccatctgggtccctgagactcctccttggcctggaaagtgctggacacaaggctggcctgagtttcctccggtcactgtctccaaggggctgcgaggctgttctgaaaacaaacctgttgaatccacaccaccttttcagagacagcaggttgcccaaggccattgacttcaaaacctttgttcaccttctggctgcaaagtggggaatgttaaggagagtaagagccagtcttagccatgccaatctctctttctttttttttgagagggtctcgctctcttgtccaggctggagtgcagtggtacaatctcggttcactgcagacttaacctcccaggctcaagcgatcccctcacctcagcttcctgagtagctgggactacaggtatgtacaccacaggaagcttattttttgtagaaatgaggtcttgctgtactgcccaggctgggtgtcccatcccttttgtaatgcctctgcgtgggcaggtaaatgaggggggctgagctgagggcccctttcactactgcagagaccaaaatggcccgaggcaagggggacggaagtgggatccgcacctctgggctttcctagcctggcagccagctgggcagtgcattcccatccacgtctccaccctgcatggcagccgctttgtgtggttaatgctgacgtgaaaggaatgttgggctgagctggatgccaagggtttttacacgcacgaatgcacggagacatcagcaccaagaccctgtaaggtaggggtgggtccacaccaccgcagatcagccctgagttccagcctgcttgtggacttgggaaacggtgtgggaggctggaaaaatccactcattcaacaaacaagtaccgtctgcttctccatcagggcccatgctggttgtttggaatacctgggcagcaaagacacgaaaggtcctcgctgtcatgggacatagataaatgtcgctgagcatgtaagagggacaccacctagcacaggaggctttccagtgggatcttgctgggcagggatgggttaagggtagaagggccttctggcctgagaaacagcatgcagaatggtcttcaagctgagggtactgcctttgagcagtggctctcaactagtgaacatgtggcaatgtctggagatattctttttgttgttgttgttttttttttttaacacagagtctcactctgtcaccctggctggagtgcagtggcacgatcttggctcactgcaacctccgactcctgggctcaagcgatcctcttgcctc[134 bp omitted]cagcctcccaaagtgctgggattacaggtgtgagccaccgcgaaaatctctatctggagatattctgagctctcctacggggtgtgtggagcggggctggggatgctacctgcatctagtgagtgggggccctagagtgtgtaggacagtccccgctgcaatgaatccatcccaaatggcactagtgctctggttgagaaactgcgtttaatgaccctcagaaaagccagtgtggctggaacgctgggttgggcgggggttgagcgtggagaggggctttggagcagctcggtctcccactaaaaccctaggccccacaaggagtctgtggattccagcctcccagaacagacctttgcccagcaggaaccaggtttctgcagcgtctggatgagcgtgcacgaagcacacgcccgaaaatcctgagcacgtggctctaccgagggactggaagcgctccaggcctcgttttcccgctggagcgattacaccctgggggcggggcccgcttcacgggagggatttttgtacaaccgtggtgcatggaaggatttttttgcagatgagagggaatcgggattaataaggggaacttgcgaccccgcgtctcgagctggccgtccctggccttgggctcaccggggcctcggcccccaagacctgacaactggagtccgcgaccacaactgggagaactacaactcccaggatgccgcgcaccgcctgcgcccgagctcgacgaggcctcgcacagccaatgggagggtccgggggcgggaactcggagtacgtgcgttgtgacgcaccgacggcgacgtcggggtttgtgtgcgcgagaggccgccgataaaggttgggtgcctcgcgccgggggccgttgggagggagtgcgcccctgccccccctccccggtccccacagctgcaccgccgctgccggggccccaccttcccgtcgacccccgcgggaaggtcctggggctgccaccctcgttcccccgattggggccgcaggtgagagaccggagggggtgggggtggggggagggaccggagggcggagaagttgcagggggtggggcgggggggggggcgtgaaaccggaaggggtaccttaaaggggagtcactatttcacctccgacatttgccagctaggccgggtccgccctcttaaagggcaaggggccacattgagagggcgggtcaggctttgcatttttacagaagctttctgacttaaaacaatgtttttcccctaaaaggcggttatctcattaaaggccagtgaccgtttcccagacattgaagcaaaaactcctgagtcctggttgcttcaaagcgatccctggtttagctcaacaaaagtggagatggggctccagtggcagcatccccttaaaggggaggtccagcctgctgaacgggtgtggcgcggccttttaaaggggatgtcttcttgttaaatgggaccccgctctttcagggcacggatatctcttttaaggagatgctggggcttctcaaaggcacgtgcagcttcttagcatcagtaggtttgttttttttttttttttttttttctggagacggagtcttgctccgttgcccaggctggagtgcagtggcgcgatctaacctgctt[225 bp omitted]gaggcaggagaatcgcttgaagccgggaggcgaaggttgcagtgagccgagatcgcgccactgcactccagcctcggtgacagagtgagaccctgtctccaaaaaaaaacaaaaaaaacacacaagttcttgtagcttgtccgacggggatgcctagccttcattcatttaaaatttgtttactgcgcacacactctgccagacattattgtaggcactgggatggcatacaacagtgaaccagacagaagcccctattttcccggcgttgacattctagcatggggaggcagaataaaacagaaagcacactggttatatagtagcggttctcatctgggggcaacggtgctccccaggggcgacactgcggctaagactcggaggtgcaggagtgagctttgtggacagcgtagaggagggcttcataggccaatgtcaggcgtccagtgggtcgaggccgggggccagggctgctgctcgacaccctgcagtgcacaggacagccctcaacagagaatggtctggccccacatctcagcactgctgaggctgagaatcctggtacattagaaggtgataattgctgcgggggaaaaataaggcaggaaaagggaatggggagttggaagggattgtagatttaaatagggctgtcagggaagctcttgcagaggggatttcagcgaagactcggaggtgaaagagcgagtggcgggcacaggtggaaaggaagggggtggttctaggcaggtgccctgaggtgggagcaggcgtgcctggccatcctgggtgaccagagtgaccaggggcaggtggccagtgaggatagcagtaggacaagtcagggaggggacaggctgcaggaagtcggcaggctcgaagaccagaactgtggcagatttctgagtacaggaatgcaatgcccagccctccctgttgacgggttcgcttcagttgctgtattgggaacagacgggtgggcagggcacgggtggaaacacggcgatccgtggggaggctgttgcagctgcctgggagagagacagtggtgcctcagatcaaggtggaggcctgtgagaagtggccagatcttggatatgttccgcctggaaggggaatctgcggacaggggcaatcgagagagaggaggcgaggagcctttggcctgaggaagaagacggctgccattttcagagatggagaagctatgggtggagtagaagttgggggcgaggagcagaagaccatagttagattttgggcatgttaagttggaggtgtctaatgaggcatccaggtggaacagtctagcaggtggtgtggcattcagagggtaggtcttatagagctggaggcctggagtcattgttcatagacagtggagtcctgagagtgggtgggggctcccagggagagaggacagacagaggacaaagtggtgccggagccccgggcgctcccacatctagaggtcagggaggtgagaaggaaccaagctggggactgagatggggtgacaggtgacggagggcagtgagggagcgaggtatcccggaggccagggggaggcgggccacggacccagtgacaagtgggccattgcgggccacgcgccgcccaggccatggagtgggggcacccgcgtgggactgaaggggtttgcgctgggaaagagcgggctgacacttgagctgctctgctgtgaaggaatggagaaacgagtctgcagctggacagggaagtggagtgaagagctttttggtttttaaagatgggagacatagattgttggttctgcagatgggaacgtccaggagaggaggaaaagtggaggatgtgggtgggaaggcacagtccacgggcactgggtcaggcctgtggggaaggattgcgcagggtttctggacctcgcactgctgacattgtggatgggattgttctccgctgtggggccgtcctgtgaattgtaggatgttgggcagcatccctggcctccacccactagatgccaggagcacttgcctctctagttaacagataaccccaaatgcctccaggcattgcgggatgtcccctgggttgaaggcacagtttgtcccagttgagaaccactagtatcgtggtcagaatgtgagaaacttcgcgtctgattgcttttattttcacagaggcatgatcaaggacagggttgcctgccaagaacaggaggggagaggaggggctggaggtttcaggagaaagaagcatgtcaggtagtcacctggggagtgcatgggccagagacatgtagtgtgagccagggagggtgatggtgagggggccgcagattttgtgggcttgaagggaaagtgagactgaggccaggcaagggggtgcctgtcatggccacctgcagcgtttgtgcagggtcgggcaggagtgaggatgtgggttggctggaggtgaaagggcgcgctggatggtagatgggctggagtctaaggatttggggagttggagcaccaagctagagtgacctagaaggctttgtggtgttgggaagtaggttgttccaggctcaaccatgaggacactttttttttccttttttttttttttgagatggagtctctctctatggcccaggctggagtacagtggtgtgatctcggcttactgcaacctccacctcccaggctcaagtgattctcctgcctcagcctcccaagtagctgggattacaggtgcctgccaccacgtccagctaattatttatttatttaattattttttgagatggagtttcactcttgtcacccaggctggagtgcagtggcacgatcttggctcactgaaacctccacctcctgtgttcaagcaattctcccgcctcagcctcctgagtagctgggattacaggcgcccaccaccatgccgggctaatttttgtatttttaatagagacagggtttgaccatgttggccaggctggtttcaaattcctgatcgcaggtgatctgcctgcctcagcctctcaaagtgctgggattacaggcgtgagccacagtgcctggccccatgaggaggctttagttaaaatgaaaaggcttagggtatggcagtgggaggagtgttgaggccgagatggaggataaggtcttagagggagagcagcaaggaggagccaggagagcctctctgcgtgtggtcttcagggaccctgcctgtctggagagggagggagcagactcctacaggcagtgcttgctctcttgaaggcgggccccagccttctcagacctggctagcctcctaaggagggtggccacagtttgctggggagtttccatttcagcactgaaagtgcagcatcgctggcacctgctcaagtcccaagcaaactgggaccattggagaccctcatcctaaggaaggtcccctgcaaagtgggtgacctggggaggtagtccctgtcccttaaagagcccgtgtgtgggtttggggttgagatgatccagtgcgggggtgagccgctgacccagaatccctcccccaggtgtgatggtcggctcccacgcggacatggcgccggcctctactgcggagggggccggggagaagccaggccctgcggcccctgccccggcggcccagtacgaatgtggggagtgtggcaagtcattccggtggtcgtcccggctcctgcaccaccagcgcacgcacacaggcgagcggccctacaagtgcccagactgccccaaggctttcaaaggctcctcggccctgctctaccaccagcgaggccacacgggcgagcggccctaccagtgccccgactgtcccaaggccttcaagcgctcctctctgctgcagatccaccgtagcgtgcacaccggcctgcgggccttcatctgcggccagtgcggcctggccttcaagtggtcgtcccactaccagtaccacttaaggcagcacacaggcgagcgcccctacccgtgcccggactgccccaaggccttcaagaactcgtccagcctgcggcgccaccgccacgtgcacaccggcgagcggccctacacctgtggagtctgcgggaagagcttcacgcagagcaccaacctgcggcagcaccagcgcgtgcacacgggcgagcggcccttccgctgcccgctctgccccaagaccttcacccactcctccaacctgctgctgcaccagcgcacgcacggcgccgcccccgccccgggtaccgcctccgcggccccgcccccccagtcccgggagcccggcaaggtcttcgtgtgcgacgcctacctgcagcggcacctccagccccacagcccgcccgcgcctcccgccccgccgcccccgcccccgcccgtggtgcctgagctctttttggcggcggcggagaccacggtggagctggtgtaccgctgcgatggctgcgagcagggattcagcagcgaggagctgctcctggagcaccagccgtgccccgggcccgatgcggcgccccagccccaggaggcacccgccgaggcgcccaaggccgaccagccaccgtcccctctgccgcagccccctcctcccgccgccgcccccgcgcctggctttgcctgtctgccctgcggcaagtccttccggacggtggctgggctctcccgccaccagcacagccacggggctgccggcgggcaagcgttccgctgcggcagctgcgacggctccttcccgcagctggccagcctcctggcgcatcagcagtgccacgtggaagaggccgcggccgggcgcccgcccccgcaggctgaggctgcggaggtgacctgcccccaggaaccgctggcgcctgccgcccccgtcccgccgccacccccgtccgcccccgcttctgcggagcggccctacaaatgtgccgagtgcggcaagtccttcaagggctcctccgggctgcgctaccacctgcgggaccacacgggcgagcggccctaccagtgtggcgagtgcggcaaggccttcaagcgctcctccctgctggccatccaccagcgggtgcacacgggcctgcgggccttcacctgtggccagtgcggcctcaccttcaagtggtcgtcccactaccagtaccacctgcggctgcactctggcgagcggccctacgcctgcggggagtgtggcaaggccttccgcaacacgtcgtgcctgcgtcgccaccgccacgtgcacactggcgagaggccccacgcctgcggtgtctgcggcaagagcttcgcgcagacctccaacctgcggcagcaccagcgcgtgcacacgggcgagcggcccttccgctgcccgctctgccccaagaccttcacccactcctccaacctgctgctgcaccagcgcacgcactcggcggagcgccccttcacctgccccatctgcggtcgcggcttcgttatggccgcctatctgcagcggcacctgaggacgcacgccccggccaacacgcctcccagcaccacagcccctgccgccggcccccagccccctgctccactggctgctgcgcgggccccgccagccacccaagatgtccacgtcctgccccacctccaggccacgctctccctcgaggtggcggggggcacggcccaggccccgagcttggggccagcagcgcccaactctcagacgttcctcctggtgcaaactgcccagggcctccagctgatccccagcagcgtgcagccccctacacctccgccccctcccgcacctcccaagctcatcctgctgccctcctccagtgctggggctgggggcggccgtgcaaggcagggcccgcgggcagtggggaaagcgggccagggggcgggagtggtctggctgccaggccctgggggtctaggggtgcagggagcggccagcgctggggccagcgggacagggcagagcctcatcgttctgcagaatgtggggggtggggaggcagggccacaggaaatgagtggggtgcagctccagcccctccgaccagccccagaagtaaccacggtccagctccagccagcgcaggaggtgaccacagtccagctccagccagcacaggaagtaaccacggtccagctccagccagcacaggaggtgaccacggtccagctccagcccgtggccggccagctctccaattccagtgggggagctgtggctactgaggcacccaacctgctggttgttcagagcggggcagctgaggagttgctcactggcccgggccccggggaggcgggggatggcgaggccagcactggtgtggtccaggatgtcctctttgagacactccagacggacgagggcttgcagagcgtgctggtgctgagcggggccgatggcgaacagactcgactctgcgtacaggaggtagaaacacttcctcctgggctgacggagccgcctgccaccggcccacccggacagaaactcctcatcatccgcagcgccccagccactgagctgctggacagcagcaacactggaggaggcaccgccacgctgcagctcctggccccaccgccgtcaggcccagcctcgggccccgcggggctccccggggctccagcctcccagatggtgcaagtggtccccgcaggagctgggcctggtgttatgacccctcagggcctgccctccatccagattgtccagactctacccgcagtccagctggtgcacacgttttgaggagaggcagtgattcccctcccgccccgcacagagaccccgactcactgccagccggggcggggcagggtgccgcaggctgggcttgctaataaagacccgagtctccccgcctgtgttttgttttcctggggggagggaagggggcaaagtcatggtcctagcccccgcctgggagcgtggagtcttaagtcttgcgtcctgggtcgcagatggcttgttctgcatcctggggccagccactacgtagggctcagttcccctgtcctgaaaccaaaaaaggccgcaggggtcattatagtggggaggtggtgacatcagactccagggagtgctacttgttcactgtaggtcgccccgctgcccccctcgtgtgagaagtagggggatccttatgcggaagggttctgcgaccccgggcgccccgtgggtggagtggggtccctggggatgggggagtcgggcgccaggatgctgagcgtggccggctcctcccgcgaaggccccggcacggatgagaatccacgcgctggcgtcgccgcccggcgctcaggttgctcagcaacgagggaacgtggggcgggagctcgcgctggtccccagcccgccgcccgtctcctgccggcttccgctcccgttcttccccaggtcccctttccccgttgctccttctctagggataggagaggtcgcttcccggccctccgcagggtcacagctcggttcctcccagcccgccctccggggagcttagcaacggttgctacggcccggagcgggcgccgccccgccccaccgcgcgcggtctgacgtcacttccgcccgcgacccccttccagacccgctcccgaaaccttgtcgaaggaccaaaggcgaccggtgcaggtgcttgctggtccttgttcttgtggcgcgggacggggacgactgtgggggagggggcgctggggaccggggtggagcgagcgtggtccgttctctggcatgtggggagggtgttcgtggaccccagtgcctgggagggagccccgtgctgcagtgttggcgtccgcagcgcgtttgggagtgtagatcgctgaataatacgggggaggggggatcccgggagactttagcaaggtcgctgagtattgtggggggcgcctgtcctgccgagatcctcgcttgggggccccgagggttctcagtgtcctgatctgggaagtgccgttgctgctccctacccctcgggggagctttggggacagaggtgcccccctgacgctgacctacttatgttctcaccaggtgcacgacgccagctcccttctggggggccggggcctgggggttgccatggcccccagccacctgtcagtgcgggagatgagggaagatgagaagcccctggtgctggagatgctgaaggtgagaggcaggggccccagggggcctgggagtggctgcagtgggggaattgcaagtggattcagccaccccctcccacccacctgagccagcctggacccctggagcgggatcttttcctcctgagcctcagccgccctgctgctgaaaaccacagcaggtgtggcaggtgggggctcacccccccagccctactgggaccccagcaccaacgccctccctggtctcccatctccagtcggctgtgcacgccagcacaacagccagctctgtgcctcggaccccaactcttcaaagcacagcccagcaccccaacctagcccagcagcctccctccagcctccactccagcctgaggcaacctccctgtccttacttccctggggcctcactgcggcattgctactgaattgagtgcccccacagctcctaattcactcatccatccatcattcgctctcgttcattcattcactccatacccagtgtgccacactgaacatcggactgtgctgccttcccttcccatttgggagctctcaccccgccccgggcagggtctacctcctctctttgtccaggaggccctagcgtttcggatggctgagccacccctcctgcccacaggccggcgtgaaggacacggaaaaccgcgtggccctccatgccttgacacggccgccggccctgctcctcctggcggcggccagcagcggcctgcgctttgtcctggcttccttcgccctggccctcctcctgccggtgttcctggctgtggccgccgtgaagctgggcctgcgggcccgatggggctcgctgcctccgccgggtggcctggggggcccctgggtggccgtgcggggctccggtgacgtgtgtggggtcctggctctggcccctggcacaaatgcaggggacggggcccgggtcacccgcctgtctgtctctcgctggcaccgccgccggggcgtgggcaggaggctgctggccttcgcggaggcccgggctcgggcctgggctgggggcatgggggagccccgggcccggctcgtggtccccgtggctgtggccgcctggggggtgggagggatgctggagggctgtggctaccaggccgaggggggctggggctgcctgggctacacgctggtgagggaattcagcaaagacctgtgaagctacagactgacagccagggcaggggaggagggaggggcgccagcacctgatgatcgcctactgtctgcgggttcttttacctgctctccctcagtgagtcctcaaccaccctgggcccagaaacagaggcctgccgaggggaggagcctggcctctgtccacccgtcagcagtgtgaagtctgttgtgtttgagcttctcagagtggaatgactccttttccttcctggccctcgggggcctctcgaggtcagcctctccaacccctacctcagctcctgtctgcactgagaaacctccccgggtgatgtctgcaaagtctgtgctgtccgtgccccaggctgggagagctatctggggagggggagaggaggccgagcagaatacaccccagagttagggtttgcgactccgcctccctgggacctggattgggtcagatgcctgtccttggaggggacaaggttgactgcttaggaggcgcgacgcacagggctgccaggcctggcccctctctgggaaggttgagagctgagacgggcagccctgtcccttcctccagatccgtctggttttttacaccgtttgttaataaagcctgaaaccgctgtgtgcctgtctcttctctgatggctttcccagtctgtctccggacacccccgcccatttctgtctggcttctcctttccccagttaacattaattgttgggggacggtgctggactgggagaaggggaggctgtgagctcaggggcagcccgaggccctgccagcccttctgagtcacgctccccattaccgaattttttccgcctcacagctgcctggtgtgcaggcagtggggtgtgtgtgtgtgtgtgtgagtgtgtggaagagtgtgtggagcccctccccttcccaagccttgacccttgtgctgcttatcccccgaccccagctccctctgggacagtgaagttcaacctctcctctctcagctggggactgggggcttcacactcagatccaccagtgagtgggaggactggagggccgggtctttcagtctcttttcctaacccaggaagtccctcctggtgtctggctgcaaatcttcttgctgctgcaccaagaaccccaggtctgcccagcccccaaccctagcagtggtctcactggatttccctgaccagacaagaggggagacagcaggtgggcgcccctcccgctcatgctgcgccccccccgcacacgtcccccaacccctgtcctgtgccttcctgcagccggccaccccctaagcatctctgggcacagcactttgctggctggagcctgcctggccgtcgtctccatctcccgtgtgggtgtctgcagttggacaccctccctcccgcccgccacccccctcccccccatgcctcagcagacggccagccccctcccgccccccctcccccccaccgtcccctgccgcctccctgcagcctctttcttcctcctggcaaagcgtccagccctgcctgctcctcctcgggcctgggcgcctccagcaggcacttccctccctccctctctccccagctgcctcctcctcttctctccccgctctccttcccctttcaccccatcccctgccctggctgcaaccatgagggtcttggcctgcctccttggtgagtgatccattctccttggggactcggggggcctaggcccccacctctgaccccttagcttgtccagtttagggactcaaacttccgggactggtcgctggtgctcctgcataccctgacatcccttctgaggatccctgctcaatctgcccagccttctgccagcccagaagcccaagggacctgccccctgcccgccccccagccctgaccctgcgggggatctcccagacatctgacctttagccaagcccatgtgtgtgtgtgtgtgtgtgtgtgtgtgtgtgtgtgtgtgtgttggggtattcaagatgaggggcctgcgctggagaaagggccacccccggcctgcccctcacactgccccaccctccgccctcccttccagcggccctggtggggatccaggctgttggtaagtgcccagactcctcccatctgcccgcccccccccccaggcctcccccttctgcccatccaggcctggcctcacccccactgggtccccggcccatccgaattccactgtgaccttggccccagctccgcaagggaatcccccaggtgtctggccgcatctctctgagcacccaggagtctgggcccaggggccagtgagcagggccactggcctacagacagtacctgcaggacagccacctgcccctacagttgccctggccttggggcccccaggatgcccctccccagtcacagccattcctccaaccctcagagcgcctgcgcctggccgatggcccccatgggtgcgctggccgcctggaggtctggcatggcgggcgctggggcaccgtgtgtgatgacggctgggacctgcgcgatgccgccgtggcctgccggcagctgggctgcggaggggcactggccgccccgggaggcgccttcttcggggagggggcagggcctgtgtggctcagcgagctggcttgccggggcaacgaggggcagctgggcctctgccaccaccggggctggaaggcccacatctgctcccacgaggaggacgcgggcgtcgtctgcgcaggtgaggacaccctggctgctccttcagggggagctcctttggagatgacccaggaaccccaagtccttagccccagcaagtctgagtgttcagcagttcagagacacccaacctcccatcccctccaaagccaggtggctaactccctcttccagggacccaaatggcctggattcccctcctctcctcatagcttctgtccctgcccccccgccgcaggtcagcgtgtggctaactccagggacgactcaacatctcccctggatggggctccctggccagggctgttgctggagctgagccccagcacggaggagcccctggtgacacatggtgagcccaggggactgccctgccaacccccacccagcgtgccctcctgccccccccgaggggagagggactgccctgccaacccccacccagcgtgccctcctgcccccaccgaggggagagggacctctgcagtatgaactcccaggggacacacagcccgccccctgccccgccccgtctccttcatagcctagggagtcctccatcacttcagaccctcagagacggaggcctgggcccccaggtgggaggaaggatgaggggctcagctcctgacccctggctgtctccactcccagccccccgcccagctgggaacccccagaacgcctcccggaagaagagcccccggcccaagcaggccaagtccacccgggcccctctgctgacgacaggagccccccgccaaggtaagctccctgcaggctcccccgaccccaaggctggttgctgtgaggcccagggcccagaaaaactgaggacctgcgggcgccctctccttagccggggccctggagggatcccagtgttccccgcgtccctcccccggggatttagacggccaggcctggtctcccctcttcttcctgccctgtcaggaggcccaggtgtcctggcccgctcaggtcgtggactcacctcttcacgggctgccggcggacagatctcaggccaccgctccctcaggcctgtttccccaggtggaaatcgaggaaggggtgtttgaatcatttctcactggccacaccgtcccctccctgctcaccccacagagcggctgcgcctggtctctggcccccacaggtgcgccggacgcctggaggtctggcacggcgggcgctggggcaccgtatgtgacgatggctgggacctgcgcgacgctgctgtagcctgccgggaactgggctgtgggggggcgctggctgcccccggcggtgccagattcgggcctggtgcagggcccgtgtggatggacgatgtggggtgtggaggaggagaacaggccctccgagactgcccccgaagcccctggggccggagcaactgtgaccacagcgaggatgcggggctggtctgcaccggtacgtcgggctggggcctggccccctcctgtcttcctcagaccccagctccctcttgcccctccaggaagctgcagcgggcctgctcccagctctgcctcctgcccgcctgctctctgcatgcccagcgcccactcaccacgctctccagcccctccttccacagctcctgccgttctccttgccaggaatgggaggagcaggcttgaggcttgggctagtgctcagccctgtcccggggcctaggccagtgaccgtttgtttaagcctcagttttcctgaaggagcgatggagctaagaatgcctgcctcaggcttgagccaagtcctggaacgcaagaagccctgcctgccctctgccaccgggctggccatggcaggggaccgtctcggagacctcttgtctctgtggccaacctctgctccttccccatcctcaagggagctggtgggaaggagggagggagggcggtgacttgggggcatggagggagactgaggcagggtggggacacccacgggtgagcctccatctcccctcattcacgccccctcagcgcggggtctcctcccctcatgtctcccagggggtccctcccctctcctgtaccccttggacctgggatagaacccagcaaacagcggttggggggtgttaggtgagagctcaggggctccctccctccttctctccttccttccttcctccctctttccctttctctttcctttctttccttccacaaatctttacacaccaccacggcaggccccaccctgctggactgcccgatccattgactgtaggaggccggcaggcagagggcacccacctggcatttcatcagcgttggggtggggacagtacacgggctgcaggcaaagctgggtgcctgcccaggatgggtaggaaatgctgacatcagtgggtatccaggggggagagaagagagaaagaggctgaccctagtctctgctgtatgctgggccctgcgctgtgcacgttacctggggccgctctgagcctcccgcagcccggacggggtggatcctcatccctctcttcacagatgtggggccgaggctcagagaggtgacgtaaatggcccaagacccaggtgcctagcaagctccagccccagccgctgacccctctgggtctgtatagacccacgctccatgcctgtcccactgcacagtcggccatagggacgtggtggggacacggaggtcagagtgggagtgagcagcagagaaggcttgtatggggtgggggtggtgccttcgtgtgcctagtgtacaagctgtgggggaagaagtgggaccttcggagcagagttcattggagggaagttgaggctctggagaggagagggtgaaggtgccaagaaaggaaacaaatgaactaaggcgcccggtgaagctgggagcttcgccagcatctgatttaattctcatggcaaccccgggagggagacgctcccctcccctgtctgcagatgaggaaaagcagacaggtgtgttagactcctccctagttctgtgctcttctctagaacagtgattgggggcaattctgcacctgcctcgttgggggacagagagagggactccagagtcctccaatgatgagtcaactcttaccccaacagaaatgtacccgaagagccaggcatggttacaggctaacacctgtagcccacgtgctttgggaggatttcttgaggccaggagttcaagaccagtctgggcaacatagtgagaccctttccctacaaaatataaaataaaaaaaaaatagcagggcatggtggcgcatgcctgtagtcccagctacttgggagaggctgaggcggggaggattccttgggtccaggaggtcgagactgcagtgagccaagattgcaccattgcactccagcctgggtgacatagtgagatcccctccccccaaaaataaaaaaatgaaatgtaccctatgtatcctaaggccagcgagaggttaatatctagactagtggctctcagctggcaagggagtgagggctttctcatccccttcctccccaaaggacatcaggcaatgtctggagacgtttttggttgtcgcagctagggggaggggttgccactggcatgtggtgggtagaggatgcagtgcaggacagttgccacgataaaggaggatgcccaatgccagtggtgctgagacttggaaatccggctctctaggatccgaggggccaggcatgggaggtggatccaggggaccagagccagagctcccagcgtccccagcccccaccgccccaaggcaagggatatgggggatgcgccagagttggactccgggccagtgacttcctgtcttggaaccttttcctcatttggatagtgaagatggaatatttgcttcccagagtcatcttggggttgcagcctgcctgagcatagcttagtccccgctcatccaccctcgtttcctggccctgtgctccctctcccactatccaggcccagcacctcggctgcgcctggccgatggcccccacgggtgcgccggccgcctggaggtctggcacgggggtcgctgggggtcggtgtgtgacgacgcctgggacctgcgagacgccgctgtggcctgccgagagctgggctgcggaggggcgctggccgcccccgggggcgccttctttggggaggggtctggacccatcatcctggacgaccttcggtgtcggggaaacgagacggccttacgattctgcccagctcggccctggggccagcatgactgtcaccaccgcgaggacgccggggccgtgtgtgacggtgagggggttgtggtggaggaccgggaggtgggcgtggtggtgcttggagcggaggggcaagttcggcgggggcgggggggtccctacgcgcccttcctgccctctctccggactttccactcccccatcttattcccctctgaatcctcaccctgcgtcactggttctcagctgggggtggctttgcccccaaggggacattggacagtgtttggaaacatttttgatggtcacagctgggggtgggggtgctcctggcacccaggggttagaggccaggggtgttgcttaggatcctgcagtgcacaggccgcctccacagctgagaacagtccagccccaaatggaaacagaggcgaggatgagcctcagccccgtggcagccctggctggccctgcctcctggcccccggcggaagccagccttctcctctgcataaggtcaccccccgcttctctgccacccctaagctaccatgccctctgctctctctgttcccgtgctccgcattcacacccctctccccaggtcagggatgtggaaagcgtgggctgtgtctagggaggaggttcggcaggaagagatctctgcgtgcagctgagaggactgaggaaggatgacgcaggaggtgggggtgccggctccgggatggagggtgtgtgtgggtggcaatcacttaccccctgctccacaggcatgcccctgggctacgtccctcccacggcccccacggacagcaacaactccacgcccagggaggctgcctccaggcccccgtccaccatgacgagccaggctccagggacggcaggcgtttcacctcctccagcctcccctactgtcctttgggagcctggaccggaagccggtgagtccctccatgctccccaagaaaacagggtccttccttctgtttccttccctcagctctgagactgtctcatggggggcctcttgcaaagagaaaggtggagaagaggagcacaggggcctcgcccaggacactgagctgggttcaatgctctgctgttgcgtctgggagcgtgtgataattcttgaacaaggggtcctaactttcgtcatttaccaagcccccaaaattctgtagccagtcctggataagagaaaggatgctgggctgagagtctgctctattcccaagctgcacggtgtggctgtaggatccatcatggggtactcaggccagcttcaaggaacagccctgctcaaacattacctttactttccagagtctctggttctttagcaaatgtgatcaatggttctgcctgcctcctttcatatatatatatatatatttttttttttttttttttttttttttgagagtggatttaattctgtcactcaggctggaatgcagtggtgtgatcatggctcactgaagcctcaacctctcaacctgcaggctcaagtgatcctcccacctcagcttcccaagtagctgggactactaattttttgtattttttttttttgcagagatggggtttgccatgttgcctaggctggtcttgaactcctgatcccaaaccatctgcctgcctcggcctcccaaagtgctgggattagaggcgtgagccaccgtgcctggtctctttcatgagtattgaaaggactgttgttttaaaatataggtgttattattactgaggtatggtgaggccaggatctcaggagatgacagccactaaaaagattgtgactgacggttctcaagaggatggcgtgccacacggggccacacagggaagcaccagggccaggcaggaggtagacggagtgagggggaagcatggcaggaatcttttatacatttatttagagacagggtctcacttggttgcccaggctggagtgcagtggtgtaatcacagctccctgcagtctcaaactgctgggctcaagtgatcctcccacctccgcctcctgggtaacacagctgcatgccaccgagcctggctattttttttttttttttttttttgtagagacagggcctcactattgtccaggttggtctcaaactcctggccttaggtgatcctcctgtcttggcctccctaagtgctgggattataggcgtgagccacccggccaggtgcaggggtctttcttgtgttttttgcaggaaggaataggtgagacaggttgagcaggcttagaactggctggtttgaagaatttcagtggggccggtggggagggtggcgactcagagggttgtccttagtcatctggtacttggccctggggcaatgaggacaggtgcagaatggcccagggtgtgagagcccagtggagagggtggtttgcacacgaaaggcatgctcaagccatttaccatctctaggaattagctaaccctgggaggggcagtccctcaggatcaggaatgctccaagatgtcaaagcatcagaaatacagaaaataaaaaggcgtggttaacacagctgtctcctcaagatgggaaaaggccgaacaaaagcagcaacttattttcaccatgatcaccattcccagaggtctcgttccccttttcctgaataataatatcagctaacactgaacgagcatgcactggctcctggtgactgatgctgttcccagttctctccgtgtctcagtccaggtgatgcttacagccactgtggtgtggatactgataggtctccatgttacagatgaggcagcaccgctgagaaatgggagagccaggattcaagcaaaaacacttgttccagggcgcacgttctttaaaaaacaattgtgataaaacatacatgacataaagtttaccatttttaccagtctttttttttttttttttttaaacagggtctcgctctgtcacccaggctggagtgcagtggcacgatcttggctcactgcaacctccgcctcccggttcaagcgattctcctgcctcagcctccggagtagctgggattacaggctgagccactgcacctggcccatgcctggctaatttttgtatttttagtagagacagagtttctccacgttggccaggctggtctcaaactcctgacctcaggtgatctgcccgcctgggcctcccacagtgctggaattaacaggtgggagccaccgtgccgggcctgctgctccctgtcttttaaaggacttcctctgagaagccttctccagcttcctcaggcagaatttttctcaccttctcctcgttgtgtgtctgccttgccctttgggtacttccactactccctttagctcgctgagctgtaatgaagtgtgtgcatgctactttccctgaagaccgagagcttttcaaagcagaggctgtgcctgactcataaacaacaacaaaacaccttattatccctggtggtctagtggttaggaaaataaaatctaagaaagaagaaaaaaacccttattaaaccaataataatgagagaaaattaagggtggtgaacaactgcatggaaaaagacttattttaattgaggtgacattcatgtaacataaagttaaccagtttaagtatacaacttaagtggtatttatacattcaaaatgctgtacaaccactactatttggctactgtgaatggtgctgctatgaacattcacatactggtatctgtgtgaatacctgttttcagtttattctgggtatatccctagtagcagactttctagattatatggtaatttgatgtgtagctttttgaggatcctccaaactctgcctgactcattatccctcatgcctaatgcagaaaatggcacaaaaaaggcctcatgaaatacttgctgcctggaggaaaggatggatgaatggagggaaggcctagatggatgagtggaaaggaagatggggggagggaaaggtggatgaagagtcaggaggctgggcggcttccccgactctaattctttgggtctcttctaccccagggtccccccagctgcgcctggtggctgggcccagcaagtgctcaggtcgactggaggtgtggcatgaccagcgctgggggaccgtgtgtgacgatagctgggacatgcgggattcagctgtggtctgccgggagctgggctgtggtggacctcagcagccagaccctgctgctggccgctttggctggggtgcgggccccatctggctagatgatgtgggctgtgtggggaccgaggcttcactgtccgactgccctgctgctccctggggaaagcacaactgcgctcacaatgaggatgttggggtcacctgcactggtaaggaggccctagctatctgttgactccaggagggcttcctggaggggaacagtaactaacatgggcactaacattgattgagtgcttcctaagccccagccctgtgctgggtgtttttgcacatataaccacattgaaatcacataataagtctagggtggtgtgtgttatgcccattttactgataaagaagctgaggcacagagaggttgggtaacttgctcaagatcacacagcaacaactaactggcagatctgggattcccactcagagaagcttctgcttcctcttccttccaggaatcaaggaaatttcccactaagaaaggagctttagctttcctacgatgaaaggaagcaggcagggcactgggagatggaaagaagccaaagtgagagccagttaacataaactcaggcaatgcctgttattaaattgcagaggctgagccaggtgcagggtcctcatgctgggctcatgaatggaatgaacatggtcttggtctttgaatagctcacagctcatgtagagaaatactctaacaaatcattgcaaacctgtgtgactcgttatagtttgaggttaccaagaccactgtcagactcaataatttgctagaagaactcttagaatcaaagaatctgttacactcagcgttatcgtttatcacagtgaaaggatacagattaaaatcagccaagggaagaggcgcctgaggcagggctcaggagacagtaggtgtgagcttccaactgtcctgtcccagtggagttatgcagacagcacttcattatcccagcaacgaagtgggacaacacacatgaggaactgccaactagggaagttcccccaagccttggcatccagagtgttcgtggggacttggccacgtacatgtggctgaccataaatcacactgttagcataggcgatctggcatggcccaagtgccccagggaaaaaaatctcttatcaggcaaggtgttccaaaggcttcgaagtcatctcccaggagccggggaaaaggcgaaacctttctttgggcagggttaatcctttactgcacacgtgtgctaatcagaaagatggaagatggagagtggtgtctcaaaggatggaggcatcacctctgctggaagctacggctcttccctctgtccccgtcttcctgagggccacgggggcaccacagaaggattctgagttcgggagtggcctgtcggacctgggtaccccactggtggtcagtaagaattgacagggaggtagggagacctgtcagaaggtataggaaatgaggccctgactcagagcagaagctgaggagatggagaggagaggtcaggtgtgaaagggtgagggggtcagttatgtccagattgtaaatgccaagaaggcgggggcagtgtcgggtttggcttgccataggctacccgagggtctaatatggtgtgtggctcataggaggtgctcaataaatatttgtgacaataaatgaatgaatgatgaatgaatgggaactgggtgagtgactggagagaaggaggggcctgggtagatgatcttgtcatcatggtgtctctgtcttctcttcctgccccactcaccttccagggcccccaggcctggactccatctcagaccccttcagctggagctggattcctggactggggagagatcgggatgcctggctcccgggagagctggccaccaagccctctgcaagtgtgactgccagtgttctggagaaaacaaccacgaaggccccagggaaaatgcctaagagtactaagaagtgggtgacaaaaaatgcaaagagaccaaccactcaacccccagtgatgccaaccacgaaacactccagggcccaaagccccccagacctaacctcacagaccactgcagcactgaccactgaggcctcccgaagacctacctctgagtttaccagaaggccgaccacggaggccccccagagatggacctctcacaccactgccacgctgacccctcaggccccccgagaacggaccactaagaccatggcaatgctgaccactcaaggcccccaagaaatgacctctgagtccactatcaagagtatccctcaggcctccctggagccatctgctgagatcccagaagggtctccagagtcacccaaagacccggccccctctcccagtgttagcaccactggggaatcaggtgagtggccgtgaggggtgtggggagagaatgggagaggctgaccctccctcctgacctaagggccttccacgcaggcctgttccgggttcgtctggccgatgggcccaaccgctgtgctggccggctggaagtgtggcatgccggacgctggggaacagtgtgtgatgacaactgggacctgcgggacgccactgtggcctgctgggaactgggctgtggaaaggtccggcctcgagtaggcaaaacccattacggccctgggactgggcccatctggctggatgacatgggctgtaagggaagcgaggcctcactgagcgactgcccctcgggggcttgggggaagcacaactgtgaccacgaggaagacgtggggctcacctgcactggtaccagggcatggcggcggtggtggggttgtcgggggtggccaggagaatggagtcagggtggggccaggtgacggcaccatggtcgactctaaagaactgggtatgaggggtcggggtggggagatcccagagttgctccagaagattccaaaaggggagggaagagcagcagcaaggacctctgagaaagaggatggggtcaaccattaccccaatttctccaaaggctacacagactatgacgattatcccccctggacctgggaccccacctcaagagaggacctggccaaggggactaccacagcgggggtacctggacacactctcccctggaggaccacccggcgcccgggtagctcctccccagcaataaggcgcctgccggacacaggtgagaggcctgattggggtggccatggagggcctccataaacctccattcgcttccctgcagggtttccagaaagacccttctcaatgagctggctgaggcctcggggcaccctggaaaggttttccttggctcctgagaccctaaacgcattacctccttgggctcaatggtgacacttcttcagagccaaggacaccatctaagagatcaggctaagctcagcaatcctgagcccatggccctcctgtaagccacacaatatgcaagcctggggccctcagtcaaacccacaaccaagggccattctgtcatcacatcatcgtccccaccccagctcccccagagcaagcgaaacctcacccattcttgaagctcacgctctggtccgggcctggtatggctcagaggtggggactcctggagtgcagcttctctccttaccctggccatcccctccctctggccagcagaatcagcctccagggccacagctccatccccctctgctctatggcctctgtcttgctgctgcagctccttccacacctgggaccacgccccgctttggcccccacatcactgtcaccacattcttctgcctttttctttgcctgtcttccttgtatccccatctctcaggatccctgcgaatccatctctgctcctgtttctcacttgctgttggtctctttttttcattatccatttctcaccctcatcatctctatctctgtattgcccaggatggagtgcagtggtgtgatctcagctcactgcagccttgactgcccgggcccaagcgatcctcctgcctcagcttcctgaaaaggtgggactacagatgtgcgccaccacacccggctcatttttaatttttgtagagacgggctcactatgttgcccaggctggtctcaaactcctgagctcaggcgatcctcctgtctcactctctcaaagtgctgggcttatgtctgggtttataagtgtgagccaccatgcctggcctcacttcattttccatgatcaaattctctatcttttcttctctgtgccaatctctttttgcctttcattttcaatttctcacactcgtctttatgccgtatttttttcatggtaatttcttttgctctctctcaccatctttctcattttttttctttcgttgtcagtttcatattcccatcatttctttttccctgtctttctttttcaatttctcaccctcattacatctatttctcactccagttttcgtggtcagtttctctttatttttttctcccttgtccttctgtctttttgtttcattatcagtctcacactctcatctctgtttctcacctagtttttcctggtcaatttatctgtctttccccctcagtctttcacttttctttcagatctcaccttcaccacctctgtttctcactccatttttcatggtaaatttctctctctcttttttgagacaggatcttgctctgttgcccaggctgaagtgcagtggtgcgatctcagttcactgcagccttgaactcccaggctcaggtgatcctccgacctcagcctcctgaatagctgggattacagatgcacaccaccatgcctggctaatttttttttttgagacagagtcttgctgtgttgcccaggctggagtgcagtggcgtggtctcggctcactgcaacctccacctcccgggttcaagtgattctcctgcctcagcctcctgaatagctgggattacaggcgtgtgccaccactcccggctaatttttgtatttttagtagagacgggtt[132 bp omitted]tgttgcccaggctggtctcaaactcttgggctcaagtcatcggcttgctgcggcctcccaaagtgctggaattgcaggcgggagccactgggcccaaactgtttctgtatcttccgtcctcttgtctttcactttcagttctcagcttcgccacctgcttctcactcgatttttcacggtcggttttgctatatcacctcatactctcatcgtctccatttctcactgcgttctctccccaggcccagcgctgtggtatcttttcctttgtctcttacggttgttttctgagtctccatctcccgcgccttccctgcagtctcccgcgtgctctcttctctctccccctcgtttctctcatggtcagcccccttccctccgtttctgtctcccgcgggctcctctgtccgtttctcaccgtccccgccgccctcgccgctccctcacgggaggtttcactccccacctaaggggcagcgtttctgtcctccctctgtgcccgtcgcagtcgctgtttctccgtcttctccctcccttccactctcccgccctgctcgccgtctggggctgcctgggtttctgcctctgtcgccccgcgccccgtacctgtgccctcctgagaggcccaagcctcccgctcccgcaggagagtctcgccgcaagcgtcctttcccgccttttttttttctggcgctcagcacgcatgcgcaggcgcggtgggcccgggaatggagggacgggatggggcaggcgttcatctgcctcgcacctcgtgacgtcacaggcgcgctgcgcctcctgattggccagccggcgcatcgcccgcagtaataatagctgggcgaagggcaaccaggccccaagaagcgggccttgaggtggggaaagggagggaggaagcaggccctagaggcgccgtgacttgggggtgggtgggctccagctgtgagttagagctatcattccgtttccagagccggaagcgggagctccgagaggtgatgctcctcgttcaaggactgccagggttgcagcgcctccctagcccatagcgccccctcgtggtggaggcgggcacgtgccgggcacagcggctgcggagacagcgggtccggcctcgggacccctcccgtagggtagggaggcagccaatgagcagaaataaatgcagaatcacaaactgcgccggtgaaatgaaaagacagccatgtgtgccaccttatcaataggaagacttggaggcgtatgcggggtggagtgggagacgaggcaggcatgcattcttagcttcaggagcaatgtaaccttgaaaaagtgacttggtctctttgagtccccgtttcttatttatattgttttatttatttattatttattgagacggagtctcgctctgtcacccacgctggagtgcagtggcgctatctcagctcactgcaacctctgcctcccaggtttaaacgattctcctgctgc[134 bp omitted]ctcccgaagtgctgagattacaggtgtgagccaccgcgcccggccacctgtttctttctctggaaaaaaaatggggcgccagggttgttggaaaggtggaacgagagctcacctagtctgtgctgggcatgcatgaccccaacttcaggccatagaaactgttgctacacctgtgtttcagatggggtaaaaagtgaggctcagagaagtttaacttaggagccacgattataacctgttttaagtgatttcacacgttttgctccttggattgggaaccatatgctaaaatagaagcacgagtctggagtccgactctcctaccaggttccaatcgtggttccaacccggattagaactagttgggtgactgcaggccccaattcaatgaacaaaatgtgtgtgaaatcgtttaaaaccgcagaatattgtttgttagggttatttgctgaaaacgaacaacagctgcaggatttcagggaacgagcgattatttgtagtagagaaatcaaggaaacctcacaggggagatgatattatttcatcagcaggccacaaggagaaatgaattctcagagaagcaaagggtgggagaaatttgcattgccagaaattttcatcggtgttatccatctctgctagactttaagctctgtgaaagatctgtatctatttcaattgctgccataatacatcgccacaaatttagtggtttaaaacaacgcagacttattattttgcagttttgtaggtcagaagtcagacttgcttagtgggctaagatcaaggcgccagcagggtggttccctttggaaggctctaggggagaatccatttccctgccttttccagcttctagaggccacctacattccttggcttgtggctccatcccccatcatcaaagccagcaacattgcatctctctgacctttcctctgccttcgtatttttctctctcactgtggcttgaaaggttctctgattttatttatttatttatgagacagagtctcactctgtcgcccaggctggagtgcagtggtatgatctcggctcactgcagcctctgctgcccaggttcaagcaattcttatgcctcagcctcctgagtagctgggattacaggcgtgtgccaccactcccggctaatttttgtatttttagtagagatggggtttcaccatgttggccaggctggtcttgaactcctgacctcaggtgatccacccgccttggtcacccaaagtggtgggattacaggcgtgagccacggcacccagccagttctctgagtttaaggacttagattggggccacttggctaatcaggataatttctccatttcaaggtctggacccttaattacatccacaagtccccttttgccacgtaaagtaacatattcacagtttctgtggattggggcacacacatctttgggcgaggggcatattatcttgtctatcatggatctatctggaatccctagtgtctagggcagtgcttgaaactcagtagttaatttttatgttatttgttaaatgaatgaacaaatgagagatgacattgtaagtctaagagacactggagatgagattggaggcctgtggaat[138 bp omitted]gcctc[224 bp omitted]ggatgatggagtttggagatacaaacgtcagttcatgtgtcaaatgcctactgtgtgacagagcatgtactaactactgggaggtagtgttagggagcaaagcaggggaaggggcaggggagactgagggttgcagtttaaaataggatggccaggtgtggtggctcatgtctgtaatcccagcacttagggaggctgaggcagagggatcgcttgaacccaggagttcaagaccagcctggccaacatggcgaaaccctgtctctactaaaaatacaaaaaaattagcctggtgtggcggtgcatgcctataatcccagctcctcgggaggctgaggcaggagaatcgcttgaacctgggaggcggaggccacagcgagccaagattgtgccactgtactccagcctgggtgacagagactgtctcgaaaaaaataaataaataaaaataaaataaaaaattcaccaagcaggggcgtgctcctgtagttccagctacccgggaggttgaggcagaagaatcacttgggccctggaggttgaggctgtagtaagccatggtcaagccactgcactgcagcctggatgagtgagaccccgtctcaaaaaaaaaaaaaaaaaaaaaaaggatggttaagagacattttacgggccgggcgcggtgcctcactctagtcccagcactttggcaggctgaggcaggtggatcacctgaggtcaggagttccagaccagcctggccaacatggtgaaatcccgtctctactaaaaatgcaaacaattagccgggtgtggtggtgcatgcctataatcccagctactcgggaggctgaggcaggagaatcctttaaacccaggaggcggaggttgcagtgagccgagatcccgccactgcactccagcctgggtgacagagcgagactccgtctcaaaaaaaaaaaaaaaaaaaaaaagaaaaaaagagacatcttactaagaaggtgccatttaagtgagaaggccctgaggccctgaggtgggtgcatgctctgctggttcaagaaatagcaacaaggtggatgggactagagcggagtgttgggtggaaacggtggcagcgggggagatggggaatggactgtaggggccagcgtggatgcagggagcccgggaggtccaggggagagtgacaatggctctgatcagggtggcagtggagaccaagggagatgtggatgtattcaagccatattctggggtttgagctgatggagctgagtgatgggttggggacagtgaggagagggaggcagggaacgggtaccttttaccaggtcggggagctctgtgaggtgggggcacagcagccagagtggggatatcaggagatattagctgtgcatcctggaggtccagggagcgcctgggctgaggatataacttagcgagatggaatttgaagctgtgggagtggatgtgactgcacagatagacagctgtgtctaatgtagttcccgccactgccagctgggaagccggggagacccgtgcttggggtatcgccggaggtttatcaccctatgaggtcatgcagggagaagaggatccaggactaaatatgagattaactttagaggttggatgatgatgaggataatggtagctgctattttatcgcgtgctctccatgggccaggcgctgttcaaagtgcatcctgtggttacactcccttcctccccatgcagccttgtgaggtgagtcctatccttagcttgattttacagataaggaaactgaggtagggagaggtcaggattgcaaaaggctgaacttggattcagactccagattccacacccttgctggctctagccttggagagtgggaaggacagaattaggtctgtagaatccagggcgcatgcagcagggatggcctcatccacaggggatggggggaggcctcctgagggcatggcctgtggactaactcctatacagcagggatggcctcatccacaggggatggggggaggcctcctgagggcatggcctgtggactaactcctatacagcagggatggcctcatccacaggggatgggggaggcctcctgagggcatggcctgtggactaactcctatacagcagggatggcctcatccacaggggatggggggaggcctcctgagggcatggcctgtggactaactcctatacagcagggatggcctcatccacaggggatgggggaggcctcctgagggcatggcctgtggactaactcctaaaggatgaataaaggcttgccagggaaggaaggggtgagacttgggagatatgtacccagagggaaagagaaccatttagaaccaggtagatctgctggggtctggagctggatgctgtcccttagctgtgttaccccaagaaagtttcttgccctctctgggcatcagtttggccatctttgtgaatcagcagcctccccagccaccctctccccataagaccagcaaaaatgacaccgtctggcagcatgaaggctgtaggataaaggtgtgagtgaggatccccatgcacttagtggggcaggttcgcagtatctaaggagatacatctgcttccatacagcaattccacaacgaggcgtcgagaaattctcgcccatgagcctaaggacatgggcacaaagagttcactgaagccatatttgtgacagcaaaacactgggagtaaccgaaatgcccatcaacaggagcatagattaatacccagctgtatatccatgcaatcgagtagtacgtagaggttcacagaatgagccagagttatgtgtatctttttattcttttttttttttccaagacggagtctcacgcctgtaatcccagcactttgagaggctgaggcaggcagatcacctgaagccaggagttcgagaccagcctggccaacatggttaaacactgtctctacttaaaatacaaaaaaattagctgggcatggtggcaggcgcctgtaatcccagctactagggaggccaaggcaggagaatggcttgaaactgggaggc[132 bp omitted]agatttccgacagtgcattctgagagtacacaggaggctgccattttaaaaggaagacggcttcaatttgtgttcttttttttttgtttttttgtgacagggtcttgctctgtcacccaggctggggtgcagtggcatgatcacagctcactgcaacctccgcctccaaggctcaagtgattctcatgcctcagccccccagttaactgggactactggtgtgccccaccacacctggctaatttttgtaatttttagtagagacggggtttcaacat[135 bp omitted]catcttgaaaatacatctttttggtttttttagatggaattttgctcttgttgcccaggcttgagtgcagtgacatgatcttggctcactgcaacttccgcctcccaggttcaagtgattttcctgcctcagcttcctgagtagctgggattacaggcatgttccaccacgcctggctaatttttgtatttttagtagagatggggtttcaccatgttggtcaggctagtctcaaactcctgacctcgtgatccgcccacctcagcctcctaaaatgctgggattacaggcgtgagccaccatgcccagctgaaaatatatctttagtgattcactgctaatgggtttttttccctggactattttttcttttttcttttttaattaatagtaccactaatggtggtgtttttgtttttgtttcttggtttgcttttatgtttgtttgcttgtttgtttttgagaaggagtctcactctatggtccaggctggagtacagtggtgtgagctcagctcactgcaacctctccttcatgggttcaggcgattctcccgcctcagcctcctgagtagctgggattacaggtgcccgccaccatgcccagctaatttttgtatttttcgtagagacagggtttcaccatgttggcc[131 bp omitted]atatctggtaggattttatagctacccttttaaggtgtctaatagaaatggaaaggtatttgattaagaatggttaataatacgaaggcatgacggaggtgtctgctgtgcctggcatcagggtgaaatttgacccttgttctatcagcgtgcagtgtcttagcaggtaacggagcaagggatttctgtaattgggaccactagccacagagcttaaggcgacatcggtcaacttgcccaaggtcttggacactgcccttctgcctggttttgcgtttggaatgagaaaacatcctaacgggctcagttgggtaggaaatgaagaggaagggaattcggggtgggggcggcagcgtgggcagaggctgggaggtgtgaaaagcctgcgcgttgtggttgttcccagtgttttgctgtcacaaatatggctgctatgaactccttgtacccatgaatccctgggctcatgggtaaggatttctcagcacctccttgtggaattgcttgtggaagcaggcatgtctccctaaacactgcaaacctgccctcctaactcaaggtcagggtccagcgtgagcagagcatcgtgtaggacgagacgatgctggagaagctggcaggggctggttatgaaggaagatggtgtctgtgggccgtggggactcatggaagggtttagggtggaaaggggcaggtgtctgccagtttttaagaggcctccaggatcagtgtggggggccagggtctcaggggaagttggtttgatgattcggataggcaatgagtatggagtgttttgttcgggtgatgaaagtgttctcaattttgattgtggcgatggtcacgcaagcttgtgagtgggtaaaccccctcagttgcaatttcaagctgatgaattgcatgatacgtgacctgtatctcaaggaagctgttgttgaggccgggcacggtggctcacacctgtagctcactttgggaggctgaggcaggagaatcacttgaccccgggaggcagagcttgcagtgagccgatattgcgccactgtactccatcctgggtggcagagtgagacttggtctcaaaaaaaaaaaaaaagaaaagaaaagaaagctgttgtttgtataaagctaggactgaattatcattctattctccctaaataaaatggcatacatatatgtatatatattatacatttatatgttatataaaattgctattatatagagattaagtgcatttggccaaaaaaaaaaaaaaggaaaaatagtattatagagatgttccaggcagtgaattaataaagatgttatggtttttcccccgctagggcaggagccttgaggaattaaaataataaattcctttttttttttttttgaggcggtgtctcgctctgtcacccaggcaggagtgcagtggcacagtcttggctcactgcaacctctgtctcccaggttcaagtgattctcctgtctcagcctcccgagtagctgggattataggcgtgtgccaccatacccagctaattttttgtatatttagtgcagatggggtttctccatgttggccaggctggtcttgagctcctgacctcaagtgatctgcctgcctcagcctcccaaagtgctgggattacaagcttgagccacggcgccaggcccaaatgcccttcattttatgtgctagtttagtgaccgtttccgtcgttggtagccaaaaacatcccagctgaatggagaaggtctccacgaggtcaggtagggctgcagtggcggtgcagttgagacgggatgatgcctgaactggggctggcccaggaggagagagacggggagtcaaactcaaagggaagttggaagactcaatcctcttccccatatctctctaggcagcaaagatggttacaagcttccctggacgtgggacacaccatcaggaaggggcctggctgaggggacccctaccgcaggcaaactaggaccaactcttggggctggcaccaccaggagcccaggcagtcctccaactctgagagtccatggagacacaggtgagacacgtggctggggtgaggagactgggacggtatttgtcctggggtaaagagacagattccagactccccactggaacccttaccccagaaagactcagcagaaatataccctaaaacaaagggttatcggctgagcatggtggctcatgcctgtaatcacagcactttgggaggccgagttgggaggattgcttaagctcgggagtttgagagcagcctgggcaacatggtgagccccccaagatatgaacattagctgggtgtggtggtacgcacgtgtggtcccagctgcttgggaggctgaggcaggaggatcccttgagcctgggtgctcgaggctgtggttgtgccactgtattccagcctgggtgccagagcgagaccttgtctcaaataaagacaaaaacagaaccaagaggttattatctagaccgctggtcatcaactagggtcgattttgcccccaaggggaatttggcaatatctgaagatattttggattgtcatggcaggaagtgagaggctacccattggcacctgatcggtagaggccggggtggtgataaacattcacaatgcacacgacattccccataacaaagaaccacccagccctaaattacaatagtaccgaggttgagaaaccccagcctagatggcataagtcactgtgacaaataggaaaatgataggaaaccctagatgagaaagaggaaaacaggtgattcccagaaaaggaagcccaaatggctgagtgtatttagaaatgcccacgctcatcaggaaccagaaaatacaaattaaaacaatggcaagtacagaggagaatgagaaaggtgggtattatccagtgtgagtgaggatgtgggaagacaggcaaccccactggacagagctgtttgataaagacaatccagcagtatttagtaaagttaagcatgattaggctggct[137 bp omitted]gtggtaggcacctatggtcccagctactcgggaggctgaggcaggagaatggcgtgaacccaggaggcagagcttgcagtgagccgagattgcgccactgcactccagcctgggcaacagagtgagactctgtctcaaaataataataataataataataataataataataataataataataataataggtgtggtggcaggcgcctgtaatcccagctactcgggaggctgaggcaggagaactgcttgaacctgggaggcggaggttgcagtgagctgagatcgcaccactgcactccagcctgggcaacagagaaagactctgttaaaaaaaaaaaaaaaagagagagagagaagaagggaggaagggagaaaggagggaaggaaatctgcatgagctccatgacgtagatctataattttgcccatttctcagatgagtgaaattgaggcacagacatcagtgactctgacatcaataattattagagtgcttattccatgctagacattacactaagtgctttgcacaaccatggtctccctgagtccttttgacagctctgcaagggagatacgcggatcatccacagtctatagctgaggaagaaactgagattcaagcagtgaagtaacttggccgtggtcaccccgctaggaagccatgcagctggggtttaaactcggacagcctgccttgagcacaagccctttacttaaccgcttctccaatcctgcaaacaaaggacaaggtggggaagggatgcgcctgaaagaccctgccctgcaggaacaagtggaaatctgtagatctgtgtggttcaatacggtagctaagagcaccgggcatggtggctcacgcctgaaattccagcactttgggaggctgaggcaggcagatcacctgaggtcgggggttcaagactagcctgaacaacatagtgaaaccccatctctactaaaaatacaaaaaaattagctgggcatggtggcacatgcctgtcatcccagctactcaggaagtggacacaggagaatcacttgaacccaggaggcggagattgcagcgagccaagatcgcgccactgcactccagcctgggcaacaggagtgaaactccgtctcaaaaaaaaaaaaaaaaaaaaa[133 bp omitted]tgaaaccccatctctactaaaaatacaaaaaattagcaggacatggtggcgagcgcctgtagtcccagcttctcgggaggctgaggcaggagaatggcatgaacctgggaggcaaagctggcagtgaggcgagatcgtgccactgcactctaacctgggcgacagagtgagactccgtctcaaaaaaaaaaataaaataaaataaaagaaaatgaaacatttagtttctcattcacactggccgcatttcaagggcttggtagccacatgtggccagtggctactgtattggcacggtagatcacagcgcattcccatcactgcagatgtgagatttcattgcctagactctatgtgcaaacaacttgggttcaagtcttagccctgcaacttgcaaactatgtctgtgtgaccttgggcgagtcacctgccctcttgccctaatttcccccttctgtaaaatggggataaaattggcactcacttggaagacagccccagaagagggtcaggctcctcctgctactcaggcccaaaatttaagggggtgcccaaaacgccaaaatcaagatacataatatcataatacagtattttttaaaatgaaaattaatgccaaaaaaaaaaaaacccatgatgaactcggtatcaaaaatgtaactgaaggccggg[175 bp omitted]gaggc[138 bp omitted]gctgggctccccctaatcctggccctgttggatcccgtctttggttaaaatgttaactttggttaactgtggatcttttggattaattttgattgtttaaaaatattgcataaaaacgcttgagcccaggagttcgaggttacagtgagctatgatcttgccaccgcactccagcttgggcgacacagccagactttatcttaaaaaataaaaaaatccataaaagtatttattttgattactaacattacccttcggagccctctttggtctccctgcctcccctggctccgcacatctcccagtcccccgctggctcagaatcctcccgtatgctgcacgcttctgagcactcccgccccctcccgcaccccagcaccccacgcatccctccctcacctcaccctcctgcacccgctcccgcaacccgcgtgcccctcggcatccccgagtccggagcatccccgcatcctcccgcagtggaggacgccaggtggcgcctggagccatcggaggacgtagggaggaggggccctagggccgggtgaagtctgccggtgacccatgacgtctcgaggctctgtgcctttccattggtcggctcctcgaggggcggggcgggacgcgtggtgggcggagccggttgacctcagaccgtccgtctgtctttcctcctcctccaggttccccgaggaaaccgtggcccgagcgccggccaccgcggcccgctgcgaccaggacagcgcccccaaccccgtccccaggtccctccgcctctccgggacccccaggcccagcgctgacctctgactccagtcgagagctcactccccactcagccttgacgtccgaggcgacctctgacgctccggacacttcaccacccaccccagacccggcctcccggacgaaccccgacctcatcttgacaagccctgactttgctttgtccacccctgactccagtgtggttcccgcgttgaccccggagccctcacccacgcccttacccaccttgcccaaagagctgacctctgacccttctacaccgtcggaggtgaccagcctttcccctacctcagagcaggtcccagaatctgacacaaccccagatttggacacaactccatactccagtacagtctcagaatattctagatccccagacccctccccaagccctcaccccactactacccctgatcccaccatggcccctgaccccatcacaacccttaaccctactgtgacccctcacttccctaccacccctcaccccaccacgacccctcaccccaccaccatcactcactccaccatgattcctgaccccaccacaacccctcaacccttcaccaccatcactcactccaccatgattcctgaccccaccacaacccctcaacccttcaccaccatgcagcccaccacaacccctcactccacaacccctcaccccaccacgacccctcatcccaccaccatcactcactccaccatgattcctgaccccaccacaacccctcaacccttcaccaccatgcagcccaccacgatgcctcatcccaccacgacccctcaccccaccacgactcctcaccccaccacaacccctcaccccaccacaacccctcaccccaccatgactcctgaccccaccacgaccccttaccccaccactactcctgatcccaccacgacccctcaccccacaactcctgacccttcctcaacccctgtcatcactactgtgtcccttccaacctccttggggacagaactctcctctcccactctagcaccaacagtcaagcccagtctgcacccccagttgaccttcacagcacctgcccctcacacctccacatcccagatacccaccttagagccctctccagccttggagtccagcccctccaggtcctccacagccacaagcatggacccactgtccactgaggacttcaagccacccagaagccagagccccaacctaacccctccacccacccataccccacactcagcctctgaccttactgtgtcccctgaccccctcctttcccccacagcccaccccttggatcatcctccccttgaccccctcaccctagggccaactcctggtcagagcccaggcccccatggtccatgtgtggccccaacaccacctgtaagggtcatggcttgtgagccacctgccctggtggagctggtggctgctgtgagggatgtgggtggtcagctgcagagactgacccaggtcgtggaacaggagcggcaggagcgccaagccctgctgctggggctgacgcagctggtagaagctgcccggggtctggggcagctgggtgaggctgtgaagagactggcagagatggcctggaccaccagcatgcctgcaccaaccaccactaccccagaggaagaagaaagacccctgaggggagacgtgtgaccctctccaggatttgaggggcttaagacacccccaaccaaaaaaaacaaaaacaaaaaaaacccccaaagtatctaattaaaaacaaggtgtgaatggtatttttggggaatcctagaaagacagaatcacaagactgattttgatatgtgaatagcccaggtgccatgccaggcggtgttgatgatggagatgattatgagggtggtgatgatggtgatgatcgtgatggtgatggcgacggagatcatgatagggtgatgatcattgtggtgagggtcatggtgataatggtaagatggtggtggtgatgaagatggtgaaataatgctgatgatcatgagggaatggtcatggtgatgaggcggtgaacatgatgatgatgattatcatgatgatgatgatggtcctggtcatgagggaatggtcatggtgatgaggcggtggacatgatgatgatgatgatggtggtggtgatgatgatgattatcatgatgatgatgatggtcctggtcatgagggaatggtcatggtgatgaggcaatgaccatcatgatgatagtggtggtggtgatggtggtaattatgatgatgatgatgaagatggtgaaatgaaggtgatggtgatagtgatgattgtgagggaatggtcatggtgatgaggcagtgaccatcacgatgatggtggtggtggtgatggtgatgatggtggtgctggtcatgagggagtggtcatggtgatgagggaatgatggtaatgatgatgatgatggtggtgccggtggtgatcatggtgatgatggtcacattgatggtgacggtgatggtggtagtggaggtgataatgatggtgtgaaaggtgatcatggtggtgatgactgtgaaggaacagtcttggtgatgaggcaatgatggtaatgatggtgatggtgatgatgttggtgattatggtggtaaagatgatcttggtgacgatcatagtgatggtcgtgacaatgatgaagcttcgtgtgagcaaaaacggccttgttcatggatgtaagcccagtttctaggacagaagctgatgcagagtacacactcagtaataaatatcttttgaatgaaagagtgcatcatcatcgtcatcatcatgactaatatttgttgggcgcttcctatgtgtcaggctctgttttaagagctttgcatggatgatgatgtcattttgtcttaacgagtgcctgctgaggaaggtagtgttaccacagctcagcagatgaggaggtgagctttgcagcctggattcctgagtttgagtccttgctgggagtaaacataagccagttacttaacctctgggtctgagcttctccaactataaaacagggataataatagtacacatacctcatggggttgctataatgattgaataagttaatacctaggagagtgcttatgatggctcttgataagcgcccgtcatgtgagagcaattattgtatttatccccattctgcagatctgggcttcgaggcacagagaggtttggtcgtgcaccccagatcactcagggaacacgtggtgggccatgcttggcactcagggcccttgctcttaaaataatattttggctggccatagtggctcatgtctgtaatcccagcactttgggaggccgagatgggaggatggcttgaggcctggagttccagaccagaaatatagtgagacccccatctttattaaaaaagaaagaaagaaaatattccacggctgtgtcagactgacctgggttcaagtcctggattaaccatgtcccggctgtggaactctggcagtttccctcccttctctgagcctcagttttttcacctgtaaaatgggtagagcaatagcacctgcctcatggggttgtgaggattaaatgtggcagtgcagataaggacaacgtggcatgtaggatgtgctcagttaatgacagtgcttgcgaccacgcctgcctgtacttttctgtgctaacgctgcatggactgttaatccacgtacatccagtcctcaccacagccctttgagggagaaactttgatccccgtttcagaaaggactctgaggctcagagagggcaggcccgttgccaaagggcacacggcagagccagggactcaaaccctgaatactgtgatgtgaatttccgtgctttgaccatggcctgcgtttccagattggggcttccatgactgccccactccaagcgaccgtgggtgggctccttcccatctctgtgcctcagcttgctggtttgtaaattgggggccgtctcggaagaccccactactctgattctgggtcctgcagcctcaagcaggaaaccatttcctcctcctcctcctctctcggcttagaggtcgtggaaggtgatgaaggctggcgcccccacagtcctgcaaaggccaacagggtccagttacttgggcgggggggtggcggggtgcggataacgtctgggggtcctgatagatggacggtctgctcctgccagcgggcgaaggagcatgctgagaattctgttccccagatctcattaagccctgagacttaaataactgctgactggttccctggagaggctgaggggagagcttctgccctggggagatggggggtcacagggcagcaccccaacatggaagaaaacggctccttttccaggtccaggtgggagcagatgaacgct[450 bp omitted]cagaacaaagttggagcagagaggacttcttcatcagataaggggtacgaaggaagacacgtatctttgattttccctgggcaatggatgtgatctcctatgagcgctgacacaggaggccccgaagaacgcagcaggtaagcggtttgcgtgagtgagagctgggcccgatgctggatccatactctaaagtcatctcacattccttgcacctcaaaatgtgacccacgggcctgcagcattggactcatgtggaagctgtttacaaacacggaatctcatgctctgcctagagccaccaaagcaaattctgccttttttttttcttaactttttttttttttgagacaaagtctggctctgtcgcccaggctggagtgcagtggtgcgatctcagctcactacaacctccccctcccaggttcaagtgattctcctgcctcagcctcccaagtagctgggattacaggcgtacgccaccatgcccggctaatttttgtttttgtttttgttttcttttttttgagatggagtctcgctctgttgcccaggctggagtgcagtggcgcgatctcggctcactgcaagctccgcctcccgggttcacgccattcttctgcctcagcctccggagtagctgggattaacaggcgcccgccaccacgcccggctaattttttgtattttttagtagagacggggtttcaccatgttgaccaggctgatcttgaactcctgacctcaaatgatccacccacctccacctcccaaagtgctgggattacaggtgtgagccaccacacctggcctttttgttttcttttcttttgtttttcttttgagacagggtctcactatgttgcccagcctggagtgcagtggtataatcacagctgactgcagccttgacctccagggctcaagcgatcctcccacctcagcctcctgagtagctgggactacagatgcacaccaccacacccggctaatttttgtaattttgtagagatggggtttcaccatgttggctaggctggtctcaaattccccacctcaggtgatctgcctgcctcggcttcccaaggtcctgggattacaggcataagccaccgccccagcccatatggtagactattcagtgtacaatagcatcatgtctaaaaaaaagtatttaatctgggcatggtggcacgtgcctgtaatcccagatacttgggaggctgaggcaggagaatcgcttgaacccaggaggcagaggttgcagtgagccgagctcatgccattgcactccagcctgtgtgacagggcgagactctatctcgaaaagaaaaaggtatttaattacatactttaattaaaaatactttattgctaaacatgctaatgaccaccggagtcttcagcaagtcatagtcgttttgctggtggaggatcttgcctcgacgttgatggctgctgactgatcagggtgatggttactgaagcctggggaggctgtggcaatgtcttaaaataagacagtaatggagtttgctgcgtcaattgactctttctttcatgaaagatttctctgtagcatgcaatgctatttgatagta[306 bp omitted]gcgtggtggcgggtgtctgtagtcccagctactcgggaggctgaggcaggagaatggcatgaacccggaaggtggagctcgcagtgagccgacatcacaccattgcactccagcctgggtgacagagcgagacttcgtctaaaaaaaaaaaaaaaaattaaccaggtgtggtggtgtgcacctgtagtcccacctacttgggaagctgagatggaaggatcacttagcccaggagatggaggcagcagtgagctatgattgtgccactgcactccagcctgggtgacagagcgagaccctgactctaaaaaatttttaaaaattgagttaatcttctccaacccggctgctactttattaactaagtttattaacattctaaatcatttattgtcgtttcaacaacattcacagtatcttcaccagaagtactttccatctcaagaaaccactttttttggtgctcattcataagaagcaactcgtctgttcaagtgttatcatgagatggcagcaatttaatcacatcttcaggctccgcttctaattctagtttcattgctatttgtaccacatccgcggtgactcctccactgaagtcttgaacccctcaaagtcatccataagggttgaaatcaacttcttcctaactcctgttaatgttgacattttgacttccttctctgagtcacgaatgttcttaatgacatctagaatggtgaatcctttccaggaggttttcaattgactttgtccagatccatcagaggaatcactatatatgacagctatagccttacaaaatgtatttcttaaataatgatacttgaaagcaaaattactaaggccaggtacggtggctcacacctgtaataccagcactttgggaggccaaggaaggaggatcacttgacgtcaggagtttgagaccagcctggccaacatggtgaaaccctgtctctactaaaaatgcaaaaattagccaggcgtggtagcgggtgcctgtagtcccagttactctggaggctgaggcaggagaatcacttgaacccaggaggcggaggttgaagtgagccgagatcgtgccactgcactccagccggggtgacgaaaacaaaactctgtctcaaacaaacaaaaaacaaaaacaaaacaaaacaagaaagaaagaaagaagcaaaaaagataatacaaactctcaataaactagttgcccaggctagtctcaaactcctggcctcaagtgatcgtcccacctcagcctcccaaagtgctgggattcaaggcatgagccaccgcgcccgcccatgcttttatattctttcacacacgtgcatgctttctcatacagtgtcttgatctctcacacatagtctcataatctcacactcatccttacactcacatctacacctgtactcaatcaaacgtttatgttcacccccacacatacagctcgctcacgctcacaagcttactccctcatgcacactcacaatcacccgcacacacaccctcacccccacccgcccactcacccacacccccgtgcccccaagcccctcctcccgctgagcacggcaggacatccctgcaggttaacagcagggaccatgtgctggagcccagctgggttcgactccaggctttgccccccggcccggtgtgtgggcacggcgggaacctggctgccccgtgcgtgagatgggcagagcccagggacccccgccaccatcttggggacaggtcggggagcagacgtggcctctgagatccctggttggggttcagcctccggccagcactaagcattacttaattagtgtcgtccctgcctgcctgcctgccggggtcaggccattcctgggaagtttatgtcctcccctgtgcttcacccatgacaggctggtcattatcacctttcagataatcctcagctgccgccagcaatcaacacctcgtgcccccctgccccctgcccagtctccactcccacccagcatgccgcatcccagccacctccagctttttgggacacattcttggcctaacagctcaggctatttcagattcacagataaaggggcaggaagtcttgatatattccacccccaccccccaccccccgcgttgttgactcccctcttctccccaatgatccctactccaggaagctcacccggattgtccaggtcagaggccccaactctatggcttgaacctggattcgaaggctccttggggtcactccacaggagcacacctgctgtcagccccgctccaggcaacacctcggtggccacagcaggcgccctgcggggtatgcaggggccagggagtgcgtgacacacgatccagctccgagttgtagccttgctctgggcctgaggccaaggagggcgcggagaggaagagacagtgtttgcaaacagggcagctgccaagcaggggcgggggagagaggaggaaggtgcgaaggagagaaggcccaggcggcgcccgcccgcggcgcctgcgtgaccttcccaccctggctacacattgacaggcatatgcgcgcacacacacggatccgatgtccacacatagcaagtcacattcactccccatacacacaagtacgtcagcacacacaagctcagatgctcatgcagacacagcaggcacaaagctgtattatcatccacgtgcagtgagacacacaacgccatcctccctcctttccatgcatatgcattcacacacgtgcacacacatgctcacacatgcacactcacactggcgtacacatactcatgctcacacatgacattcacacttgcacacacgtgcacacacacttatgcttacacatgtacactcactggcgtacacactcatgctcacccacgaatttacatgtgcacacatgtgcacactcatacatgcacacacattcacacttgcacacatgcacacacacatactcgtggacacatgaatactcactggcacacatactcatgctcacacatgacacacacttgcacacatgtgcacacttgtactcacttatgcatatgcatactcaatcgcacacacacgcacacactcacacacactcatgcacaggacagtcacacttgcacatatgtgcacacttgtactcacacgcacgcacacacattcatacttgcacacatgtgcacacacacgcaagtcatggacacacacgcacagtcactggcgtacacactcatgctcacccacgaatttacatgtgcacacatgtgcacactcgttcacacttgcacacacatgcacacacatactcgtggacacagatgaacactggcacatgctcacgtatgacattcacacttgcacacatgtgcacacttgtactcacatatgcatatgtatacactcaatcgcacacacactcatgcacacaggacattcacacttgcacatatgtgcacacttgcacacacacattcacacacattcacacacatgtgcacactcacgcacacacacatactcatggacacacatgcacactcacactcatggacacacatgcacactggcacacatacgcatactcatggacacatgcacactcacactcatggacacacatgcacactggcacacatacgcatactcatggacacatgcacactcacactcatggacacacgcacactggcacacatactcatgctcacacattactgacttgcacacatttgcacacacatgcacacactcacaattgcacacacgcgcacacactcgcacaatgtgcacactcgcatgcacgcacactcacactcagacacgtgcacactcactggcacacactcatgctcacgacattcacacttgcacagatgtgcactctcacactcatatgcacacgcatacactcacacacatgcacactcacacacactcatgcacacatgcatatagagttccttgatggaagctttgagaaccatatctttcattccattgttagcacacaaactttggtttggtaaaggagagggattcttagaagcaggtggctcactccctcctgcccacagctctgccatcaggaccccctgcaggacagcagggaggctcaggcagcaccatgagctcaggcagctcatcctcgcccctccgtctctctctctcccttcctctctgtctcttttctgtctgtgtctctcttcctgtgtttgtctctctccatctctgtttctctctctgtctctgtctgtttctctttctatctctgtatgtgtctgtgtctgtttctctctctctcttcctccacctgtttctttttgtgtgtctgtttttctatctgcatctctccttctttttctctcccccgtctctgtttctctgtgtgtgtgtctctgtctctctccatctctccctgctgtttctctgtgtctctgtctctctacctctgcacccccctccctcctccacacgtcctctgatgcacactccccttctcgttcccgagcagacagactcgcagcagcactgggatctgagcgccagatggagtttatttgcagagtggctggggcgagagaaggcaaaacacatcacagagagggtggtgccaggtgggagggagacccggccggagagaaggagagaggacggcgggaggacagggacggaggggaggctgcgccacaccagacaggctaatttatttaacagacatttcctgatccctgctgcaggccatcgctgagtacatggggtctgtcagcagacggaaggcggcaaagacccccgactccaggagctcacaaaataaccacaaaaaataagccatgcagttagaagaggatacacgtcctagagcaacagcagagtggggggatgaggaggcagacagtaagcatttacaacgcgcagctgtaatcccagcactgcgggaggccgaggtgggagactcgctccaggccaggaatttgagactagcctgagcaacacagcaagacccgcccccaaccatctttttaaaaagttaaaaattagcctagcgtggtggcgcatgcctgtagtcccagctactcaggaggctgaggcaggaggattgtttgaggccaggagttgacacccacctgggcaacatagcaagacccctccatctctaaaaaaagttaaaaattagcctagcgtggtggcgcatgcctgtagtcccagctactcaggaggctgaggcaggaagattgcttgagctgtggattttgagactgcagtgagcagagatagcaccactgcactccagcctgggagacagagcgagaccctgtctcaaaaaaaataaaaatgcgaggggtgaggggatgagcctaaagtgccctgagcaaacagcaagtgcagaggccctggggaaggtggcggcaggtaccgagagccacgcggaggtctgagaccctggggaaggtggcggcaggtatggagggacatgcagaggtctgaggccctcatggaccaagggaggaatgcagcctgcagagaggagagaggaggaggacgccgaggggaatcccaagccccatggatgaaaacacaccgaggagacaccaaaagccgttggccttgggggcctcgggtggggcggcttccctttctgcatcccccggggcctcctcactgcccagcctcctcttccaccgctcccactgcctccgcctcgccctcccgctgcctccaggggcgccccaggtgctccctgatggcgatcacagcgctcctccttcgggggtgagggtccagcagcccccgcagaagcgcgtcggccgcggcggccaggccgaaccagggctgagggcggtcccggggctggcccgacgcctgccagatgaggaagtcctcgtagaaggggtcggcctcggccaggggccggtcccaggggaagtagcccgtgaggaggcagaagagcaggacgcccagcgcccaggcgtccagggcgggctgaatgggcaggccctcggggagcggcgggggcgcgcagagctcgggggccgtgtaggggatgggcggcccggccaggcgcagcagcgtcccgcgaggcctcgtgtggccgaagtcggtcagcttgaagcgccggcaggccgggtcgcacaccaggacgttctccggcttcaggtcccggtacaccaggccgcgggcgtggatgtactccagggcggaggccagctgggcggcgcagcggtgcaccgcgggctgcgggaggcccacctgcggggagaggggtcagggcccagtgccccggggccacggaaggcaaccgagacccaggaagcaggcccaggacgccaaggaggccggtaaggaagacggtgaatagttggccctgtgaggcctagtgtgacctgtgaggcctgcgggtttagtgtggcctagggtgaccccgtgaggcctagtgtgacctgtgaggcctgtgggtttagtggggcctagtgtgacctgtgaggcctgtgggtttagtgtggcttagtgtgacccgtgaggcctgtgggtttagtgtggcctagtgtgacccgtgaggcctgtgggtttagtgtggcctagggtgaccccgtgaggcctagtgtgacctgtgaggcctgtgggtttagtggggcctagtgtgacctgtgaggcctgtgggtttagtgtggcttagtgtgacccgtgaggcctgtgggtttagtgtggcctagtgtgacctgtgaggcctgtgggtttagtggggtctggggtgaccctgtaggacctgtaggttaagcggggcctcgggtgaccctgtagggcctgtgacttgattggggtccagtgtgacctggggctgcctggtgagtctccatggtgtatcgtgtgagttctgtgatgtctatgaactccaaagaggcctaacaactccacgagtcctgtgggccccacgaggggcctccggggggtaggggaggcccagggaggcccaacgcagtggctgtggctcctgcggcccaggctgctcaggacgttcctgggaggccggtgaggcactcggaggcggcctggggtctgcctacgcaccttgggctggatgaaggccatgaggtccccgtgcaggacgggctccgtcaggaagctgtaggagtgtgccgactcgatgccaatgccgtaggccgtcacgatggctgagtgcgcgcccagcgagagccccacacagaactcgtacaggaagccacggagggacgtgcggggtttcgggagctgcttcagtgccaggggtgtgcctggggcagcagggacaggtatgggaggcgtgcagcagccaagggccacctgggccagctgctctgttcccctgtggtcccctcaatggcccctcagcttggactctttcccatagaccatctccacctcctccaactcccacctccctcctgagcccatcctaacagcatggccacccaagcatcaccagcggtaccaatagttatagcacgctggggaccagctgggggctcaggcctgcgatcccagcgctttcagagaccgaggtgggaggatccgttgaggccaggagtttgagaccagctcggacaacacagtgagaccctacctctaaaaaaagttttaaaaaggccgggcactgtggctcacgcctgtaatcccagtactttgggagaccgaggcgggtggattgcttgatgtcaggagttcaagaccagcctggtcaatatggtgaaacctcttctctactaaaaacataaaaatctagttgggtgtggtggcgcatgcgtgtaatcccagctacttggccggctgaggcaggagaattgcttgaacccaggaggcagaggttgcagtgagccgagattgcgccactgcactccagcctgggggacagagtgaaaaaaaaattaaaaaaataattagctgggcatggtggcatctgtaaaaaattaaataaaataataacagtacgtggtgaatttctaccttgctttcttacaagtctatagccatggagatggagggataccatgaaatttctccaatgacctcgtttggcttctcatgacagcaaactcgtgtttgaggcaaaaaggtatttttgagacacctggggaaaaggtaacccacactgggtaagaaagccaattaggaattgtggattttgtcacgtgtggaaacgacttcctagaagctaaactccccgaaggaacttctgatgtcttccttttttttttttttttttttttttgagatgcagtttcacgcttgttgtccagactggagtgcagtggcgtcatctcggctcactgcaacctctgcctcctgggttcaagcgattctcctgcctcagcctcccgagtagctgggattacgggcacctgccaccatacctagctaatttttgtatttttagtagagatggggtttcaccatgttggtcaggctagtcttgaactcctggcctcaggtgatgacccacctcagcctcctgaagcattgggattacaggtgtgagccactacacccgccctttttttttttttttttaagacagggtctttctctgtcgtccaggctggagtgcagcagcacaatcatggctcactgcaacctccgcctcccgggctcaagcgattctcctgcccaagctccctgagtagctgggactacagttgtgcaccgccactgggctaattgcacaccaagctgatttttttccctgacaccagaaattcctgctaactggctaagttttttaaaaaaaatttgtagagacggtctcgctatgttgcccaggctggtctcaaactcctaggctctaagcaatcctcctgccttggcctcccaaagtgctgggattacaggtgtgagccaccatgcccggcttggtttctttgatttctgagccatcagctgccagggtgcaaccttccccctcacaaggccgtgtgtaactgggataaattccctccttattggcccagcgcagtggctgatgcctataatcccagcactttgggaagccaaggtgggcggatcacttgaggtcaggagttcgagatcagcctggcaaacatggcgaaaccccatctctactaaaaaatacaaaaattagccggtgtggttgcacatgcctgtaatcccagctactcggaaggctgaggcaggagaattgcttgaacccaggaggcggaggttgtagtgagccaagattgtaccactccactcactgcagcctgggtgacagagcaagactccatcttcaaaaaagaaaaaaaaggaaaagaaaagaaaggccgagtgcagtggctcacacctgtaatcccagcactttgggaggcccaggtgggtggatcacttgaggtcaggagttcaagaccagcgtggccaaaatggtgaaatcccatctctagtaaaaatacaaaaatcagccaggtgtggtggtgcatgccttgcctgtagtcccagctattcgggaggctgaggcaggagaatggcgtgaacccgggaggcggagcttgcagtgagctgagattgcgccactgcagtccacagtccggcctgggcgacagagcgagactccgtctcaaaaaaaaaaaaaaaaaaaaaaaaaaaaaaaaaaaaaaagaaaaagttccttccttatcaaaaacaccagccatccccgcccactctgcagccagatgcagtggggtctcttctgcgtgttcacagcgctcctgatcactgccgccacggccacgccacccggtgttggcgatccctgcccatctatgctccccacggtgccctgagcttcttaacgacagtgacatgttcagggccccagcatcatgcagcccaggggcaggtgtgctggaggcctccagatacaggttcagtgaaatggccatggaggggcctcattggcaatgcccccgcctgttactgctcatgcctccggctttgtgagcacccagggctggatctctgcatccgtggctcttcctgaggtgtgctgttgtgtggctgtgttattgccctctgtgttattactgaattgtgtatccccaaaactcgtatgtgggagtcctaacccccccagtgctgaatgtggctgtatttggagatggggtctttaaagaggtaaaatgaggtcactagagtgggcaggccctcatccaatgtgactggtgtccttataagaagaggagatcaggacacagacacacacagagggacgaccatgtgaggacacagggagaagacggccaaatgcaagccaaggagagaggcctcaggagaaccaaccctgctgacatcttgatctcgggcttccagcctccaaagctgtgaggaaacagagctctgttgttggccaggcacggtggcgcacacctgtaatcccagcactttgggaggctgaggcaggaggaccacttgaggccagtttgagaccagcctgggcaacacagtgagaccccatcttaaaaaaaacatttaaaaattagccgggcatggtggcatgcgcctgtagtctcagctacttgcagagctgaggtgggaggatcccttgagcccaggaggtcaaagctgcagtgagctatgattgtgccactgcactccagcctggacaacagcgagaccctgtctcaaaaaaaaaaaaaaaagaaaaaaaaagaaaagaaaaaaggccaggcacagtggctcacacctgtaatcccagcattttgggaggctgaggcaggaggatcacttgaaataaggagttcaagactagcctggctaacatggtgaaaccccatctctactaaaaatacaaaaatgagctgggcatggtggcatgcacctgtaatcccagctactcggggggctgaggcacaagaatcacttgaacttggaaagcggaggttgcagtgagctgagattgtgctactgcactccagcctgggcaacagagcgagactccatttcaaaaaaaaaaaagaaagaaaaaagtcaaaagttctgttgtggaagcgcctgcctttgttatggcagccccagcagatgaatgcacactttttctgcattcatgctaggagatttttgaaggcagggactggctctggttcaattctgggtccactgcccgcccaacccccccagcacagggctggcctcagaaggcgtgccctgaactgactgacctcaggttgcctccctattttccgtttcatggaaggacacggtgcttggcagaaaggcccagggtagtggggagctgtcctgcgcacccactgtgtgccggccttgctaagtgcttagcagacagcatcactctgcatcatcccacggtgaccactacagccgccacaggaggctcctgagctgggagctctgtcttacccagcattatacaaccccagcaactagagcagtccacattcactcagaggatccaccattcttccaagtagaaatcatcacccacattttccaaaggaggaagctgagactcagagagggcaagggagttcctcaaaacacagtttttggcagggcaccgtggctcatgcctgtaatcccagcaattgggaggctgaggcaggcggatcactggaggccaggagtacgagaccaccctggccaacagagtgaaacctcatctctactaagaaagaaaaatacacacacacacaaatgtagctgggtgtggtagtgcatgcctatagtcctagctacatgggaggctgaggcaggaggaacacttgaacctgggaggtggaagttgcagtgagattgtgccactgcactccagcctgggcggcagagccagactgtctcaaaaacaaccaaccaaccaaaagaacaaaaaacaaaaaacacacagctttggagggcagaggtaagacttgattcaggcctgccagcctccccagcctgggctaccccaggcccgtgccccgcccccagctgaaccctgccacctctggccccacagcctcgtacctttctgacgatgggtgaccagaaggacgcggccatagcaaccctggcccaggggacgcacttcctcgtagagctcgtccacctcggctcggaccagggtctgagcactcagcgtcatcatgtcctccagcgcgcgggcagcctcctggccctgctggagctcctctaatgtcaggccgcccagaccctcctcctcgctgtcctccgaagcccctgcctccgccggcccttcctcagactgtttgccgggcatctctgcgagaacagagaggggtgcccaggctcaggtcccaggcccaagggaggaggggactgggggtctggactcctgggtctgagggaggaggggctgggggctcatcgcgcttctcattgtgactcagtctccctcttggtgagaggtggggagacaagtctggtgtgagttcaagccccaggtcacagatgtccctgcccgcgtgccgccgccgccacccgcccaccctgaggttgaaagatgaaccagataactgagactcccccatcttgtttccaaagcaaacagacttgggccctgggggtggatgagtagactctgtctcctgagaacaaacaggtgctcttgggctcagggctgggagggcgggctgtgcagagggcctgggacgcctgggtcctgcatgggaccgagcacttgggatcagtccccaagctcctgacaggcctggggtcccactttcacagcccacccacctccctccgacccagccccccagcccctcctccgccaggcccaggggtccaggcccccagcccacctctctcccggaacctcatacaattcacacaactggggaccccctgattctgtttccctcaccctccaccgctctacagcctccaggtgcagcccaggctcccctgagggaccgaggactcgggccacctggtacagtcaccctcaggtgctgcccacctcaggccagggcaccttgcccacctcccaacctgggctcagacctccagacctcacctcctccaaggccctcctgaccctccggccgccggctgtggtcagtgcccggcacttagggctcatgccagcagaggcctgcctaggagcaagaccccgccccgactttgggggtcgtaaggccccgcccctgggcccgccccttctgcccccactgggagcagagcgacatcgtgtgatgactcctggaactggctgtggtcaggtgaataccctgacccaagagttgagccctcctccttcagacccaggagtccaggccccagcccctcctcctccctcagactcaggagtccaggcccccagcgcctcctccctcagacccaggaatccagtctcccagtgcctcctccctcagacccaggagtccaggccccagcccctcctccctcagacccaggagtccaggcccccagctcttcttccctcagacccaggaatccaggcccccagctttccctccctcagacccaggaatccagtcccccagtgcctcctccctcagacccaggagtctagaccccagcccctcctccctcagacccaggagtctaggtctccagcccctcctccctcagacccaggaattcaggtctccagcccctcctccctcagacctaggagtccagacccccagcccctcctccctcagacccaggagtccaggccccagcccctcctccctcagacccaggagtccaggccccagtccctcctccctcagacccaggagtccaggcctcagcctcccccacccatctgaagttttccggcagaactgaggcctccccaccccctcaaggcctctcttcccagttgctccagcacctgcttcccgcccctctgagtctgaggtcatcccacactgcatcgttctggaatctcattgtctcattctttccccaaactagaccccagcatctgatcccctggacacccctctccaagcacttgtgtctgacctgtcaatggggcattgatggggcagctgggtggggtcaaggcaggggtgggttccagaaatgatttcattttctacacgggacccggactcctgggcctgatggaggagggggttgaggacctggactcctaggtctgagggaggagggggttgaggacccggactcctgggcctgagggtggagggggttgaggacctggactcctgggcctgagggaggagggggttgaggacctggactcctgggtctgagggaggagggcctgagggctcctgattccaaagagaggaataacaataaaaatagtttgaaagcgcataacaggaatacaggccagtgagtgcctccctgctgtaagcacagggagattaagccccactaggaagtccccaagccttgggccacagtgggacttcagacccctgtttttttctgggacggttgcacccacccttcagggttttttatttcttttttttttttttttttttgctttttgagacggaatctcgctctgtcacccagactggagtgcagtgacgtgatctcggctcactgcaacctccaactctctggttcgagtgattctcttgcctcagcctcccgagtagctggaattacgggcatttgccaccacgcctggctaatttttgtatgttttagtagagacagggtttcaccatgttggccaggatggtcttgatctcctgacctggtgatccacccgcctcagcctcccaaagtgctgggattacagaggtgagccactgtgcctgggctatttttatttttttgagacagggtcttgctctgttgcccaggctgagtgcagtggcccaatctcagctcactgcaatctccacctcccaggttcaagcgattctcatgccttggcctccagagtagctgggactacaggtgcctgccaccactcctggataattcttatatttttagtagagacagggttttaccatgttggtcaggctggcctcgaactcctgacctcaggtgatccacccgcctcagcctcccaaagtgctgggattacagccataagccaccgtgtctggcccacccttcaggtttatactgccatgactgatgtgaagtcacttcatttttttaaataaactttttattttggaatcattttaggtttataaaatggttgccaagatcctgcggagagttcccatgcaccctcccccagcctcccctggtgtcggcatcgcgatgcaaaccgtgagacatttgtcaaaactacgaggctcacagttgggccaacaccagactgttatttcagcagcgcttccacgatggatcgagcccaggatgccgtgtcgtatgtagtgagctcacttcccagcctggaagcataccttcctgcttaggaaacacagtttccagttctggaccctccgctgggtgctggggtcttggatttggatctagttcatccccgtcctgcaggcgtgaacctccacaagccaggctccgtgtcctgtctggcaggtgccatgggactgcggggcgcgggctggccttggtgaggaaggagacccatgggtaccaggcctggctcttaggattgacgggtctgagaaagggggacggagctgggacaatcacaatccgtggtgctctgtgggagcagaactgggaaggatctaaatatggagaagaccaggtccagcctggacagtcagaaagagacatggattgttctaatacaagttccccaggaggccagagagggctgggggtgggggccactttctggagccatgggtcagggggaagatgctctcggtggaggccacacagtgcgccaatgtctggcagcagctgtgcgtgcatgcgtgtgcatgcgtgtgtgcacacatgtgtgcatgcgtgcgagtgcgtgtgtgtccatgtatgcacacatgtgtgtgtgcgcgcgtgtgtgtgcatgcatgtgcgcatatacgcgtgtgtgtatgcgtgagtgcatgcacatgtatgtgcgtgtgtgtgcacacgtatgcacccatgtgtgtgtgcgcgtgcgtgtgtgtgttctcacatgtgtagatttaggtccagaacagatgagtggcgcccatgacatcacccacagcccagagaaatgggagaggtggagggtgaggtttatatggtgtcggatcctaaagttcagatcttgtgacatggacagcgggagccacggaaggtcttagaggagaggagtgatcccatcagaactccatgatggccaggcgtggtggctcatgcctgtcatcccagcactttgggaggccaagacgggtggatcatttgaggtcaggagttcgagaccagcctggccaacatggtgaaaccccacctctactaaaaatacaaaattagccgggtgtggtggtgcgggtgtaatcccagctacttgggaggttgaagcaggagaatcacttgaacctgggagggggaggttgcagtgagctgagatcgcgccactgcactccagcctgggtcacagaccgagattctgtctaaaaaaaataaaaataaaaaagaagacactctggacggagggaagaggaaaggtccttgagggaggaagggatgggagcctggatcctgcgtctgagagaggaggggcaggagctgggctcttgggtcctcagttggaagaggaatgcgcgtccaagcccagcgttccgtagggagagtgcaatgtgttccctctctgtcctcccgggtgcagctgtctctccatccaggtggccctgggggctgggggaagggcctctggcccaggctctggccacctgtctctgtcacctggtcagggagctcccccatctgtccccgtcctcccaccacttttgctgtcatcaccctcatctgtccactcctccaggcttgagcctccctcctccctgtcctcataggacacggcgctccccaaaaccccaggtccctctctgttcccttgcaacccccagtcgtcccccaggaagtccaggacagccagtggggggctcctagtctcgggatccaggtccagaagcccctggagcaaggccagggctgggggcgcaaactggtcccagggtggtggtggctgaggtggctgaggcttggtggtcacccagccagcgaaggcctcgaactcagggttgggggccagtgccacgtcccaagggaaacaggcagtggcagcacagaagagaagcacccccaggccccaggagtccacggctggccgcagaggcagggtgtcgggcggtagcaggagacagagctcaggcggtgccgtgggcagaggcactggtggggcgggggtcgggctgccctctggccgggtcagacccaggtctcccagggccacacggctgcagaccgggtcgaagaccagcacgttgtcaggtttgacatctgcgtggaccagcccccggctgtggaggaagtccagagctcctgccaactgggccaccacccgcttcaccagcagttctgggaggccctgaggtcaagaagacaggaggagggtcagagtgtcttggttttgtcttttttatgttgtccaggctggtctcaaactcctggcctcaagcgatcctcctgccttggcctcccaaagtgctgggattataggcatgaggcactgcaccagttggttccttctgaataatttttgaaagaggctctagattcctaagtcctaaaagtttgactcttggggtttgagaatctagaaccccagactagtggctacctccagtgttcccaccacatgctcccaaagactttctctccatcatcctcaacctcaacctgcagccatatctgcactcctgtagaccaactcccagctggtctcccagttttccccactggaaccccagttataaccagtagctccttcttttagcttctttcaaagattctcctaactcaaacactcaggcccactgtgaacatttcttatatatcttttgtaaactgaccatccagatcttctccagtgagaactcaaatttcattcttaaccctaatcttagtcttgtatgagtctagaccccatctctaactcagaggcttttctaaaattccccagtttatttcatcaattgattatctatccgtctagccagccagctggccaggcagcaattcatccatgaagccatccatccttccaacagtattgaacagtgtgtccatccaacatccattccaccaaccagtcagcaatccaataagttattctgttatttaatatccaacatccatatattcatcctcccttgcttcctttcacccatccactcaccatccattaatcatccatccaccaatccttccgtccacccacccatccatccatccactcaaccaatccttccatccacccacccacccatccactcatccatccaccactcactcacccaccaaacctttcatccatccatccatccatccatccatccacccaccaatccttccttccatccatccacccatccgcccaccaatcctttcatccatccatccatccatccaccaatccttccttccgtccatccatccatccgcccaccaatcctttcatccatccgtccatgcagccatccacccacccatccatccaccaattcttccatccacccacccacctatccactcaaccaatcctttcatccacccacccacctacccatccactcatccatccattcactcacccacaaaacctttcatccatccatccacccatccatccacccaccaatccttccttctatcgatccatccatccatccatccatccgtccatccacccaccaatccttccttccatccatccatccacccaccaatcctttcatccatccatccacccctccatctacccacccacccatccatccacccacccatccatccatccatccacccatccatccatccacccacggatccttccatccacccacccacccgtccactcaaccaatcctttcatccacccacccacccacccatccactcatccatccatccactcacccaccaaacctttcatccatccatccactcacctaccaaacctttcatccatccatccatccacccaccaatcctttcatccacccatccacccacccatccatccacccacccacccatccatccatccaccatccatccatccacccacccatccatccacccatggatccttccatccacccacccactcatccatccatccatccactcacccaccaatcctttcatccatccatccatccatccatccatccacccacccacccacccatccatccacccacccatccatctaccagtccttccttccacccatctattcacccacccatctgtccactcacccatccttccatccttctaattctcaatgagactcatttctccacatgtaccttcctcatccccttccttcttttattccttccatttatccctaactttatctcaaatccaaaatctattcctgaaactatccctacccctaatctccaaactcgagagaccctagaatatcatgggttctgtcctgacctggtctcctttctagaagaaaccccattatagcccatctccaactcagtctatatacacatcctcaaccgtctctgcttctctctgcagcccattcatgcttttctccatactcacgatgaatctataatcaactctaaactcaacccacccaactccacccatgcccacaccctaacctcagagtcaactaaaatcccaaccctgtctccctccccacccccttcattgactccagtccatcctcaatcccacccccagctccctgcctttccacgattgtgtttgggtgattggatggattagggttgaggtcaggcatggaacctcgttgagaattagaaagggggaggtcatgtgggggctcagggtggagatggattgggcgggccctgatttggggtcagagttggagacagagacggggcttgggacagagttggacctgggataagcactcccaacctttgtccctcgtggcctcaccctttcctgcagcatcccgctgaggtccccacagggcgcgtactcctgggcgaaggcaaaatagcggggggtctgtaggggtcctgccagggtctgcagcaggcctgggtgtgcagagacgcagcggcccacacagaactccctcaggaaggtgcttctcaggaccaaatcccgacgcaggagcttcagagccacagctggacctgccagggagatgggtcggagggacactcaggcggctccagtcctgctgtggggcctgagggaagccgtgtaaactctctgagcctcacacttctcatgggcagcacgggctcccctgtctgtgaagtgtgggtgggaggagaccttctttgaagaccctccctgctctgcctcggactgcggcgtgggcttgcacagccgcctcaccctctccgggcctcagtttcccctggcatcaagtaagagacacggtggtgacttgggttccaacttgagttgcatacctgtcctgctgtgggaccgtaggcagtccctcgccctctctggggtggggcctgtgtttctcagaagatcccagagctcttaactttcagagtacccccactgagaagggtccccatcagctcctcctgggaatgccccctgtctgggtggcttccgagaatgcttattgtggggcagttggggaggctgcccttgggtggctgaactcacccccctggtgaggctgggcaaggagcacgcggccgtaggagccggagcccagcttccggatgaggtggtactggtcccgaaggctcctcaccggggtcaccctgctggtcgtcagctccaccagccgttggagggctgtggctgtgtcctcctacgggagaggggcagggtgaggagggggcgcgtctggggtccactgagagtggtgggggaggaggtcacggcgcagccccaggatggagggtggggcaggggacaggggtcactgtccccagagaggaggatgagtcacagtgactcacccggactcgggccacctgtttttgtgtcctggagaggttaggggtcactgccacagaggccccgcctgcccctgtctgtgggagcaggccaggagcccccagccccgagtgggggtgcatcctcagcccacacagtccccctgcccaccctggtctctctctccaccgtcctcttcccctgtgcatcccgctgtgtgtttctgagtccaattctctgggggccttggtctcgctgtgtgtccttggatctctgtcatcctctctccctgggtctgggtctctgaggtctttgcgtttccctgttttctgtttctcttcctctctctccccgtgttgcctcctgcctctctctccttcttttctctctctgtcttcctcccctggctcccgtctctcacctctgggtccccatcctcaggggtctcggaggccctgcgctccatctcagggcttcctgatgtggggtggcccttgggcgggacccccccgtcagggctccccagaaagcaaccagccccctgcaccccacaggttctcgctgcgcagagccaagggatggaagctcgtctgcaaggtcagcctcagtcgccccttgtctgtccggctctgtctagctggaggagtgtctctgcctctctgtgccctcctgccaccctctgggtgtattccctgctgtgcttcccaggtgatagcccttactccccacaccctctcttcccctctctttagccaaccccagtctctccttccttctacaggaacacctttctgtcagcctctctcttgctccgtctatcctctctctttgtgcgtctttgtctccttctctccccgtctctctctctccaccctccctgtctctgtctcgcacttgggtctctggggtgggactccccctccctgtcccgtctctgtgggtcgccggcccctctcccctgtccgcacactgtctccactctttctccaccaactctgggggtgtctccacgctctgctccctgcctgctcccctctctctgtctgtctgtttcccgtctctcccggcccctctgggcatctccgtccgctctccccagtgtctctgcgtctctctcctcctctttgttcctgactctctctcaaagcctttgtccctccctttctctgggcctgggacaggggtgtgtgtgacagctcagagacagagacatcctgtccccccacacccctccctcaccccctctgaccgctgccccctccctctcccttccaaacttagaccagcttggactctgggctccagtcccaggacagacgggacaaaacatattgtgaacccccaacaaggcccaggcctgagggcagaggaaagggtgggacagacccctccacacacctgagctgggatgactggcccagagctgagcacctctgtcttgccccagaggccaggagcgctggtgtccagggaccagggaacagttcccaaagccctcctccttcacaccaggagtgctggccccagctcctcctccctcacacccaggagtccaggtccccagttcctccatcctcagacccaggagtctaggccccaagccccacctccctcagacccaagagtccaggcctccagctcctcctccctcagatccaggagtctaggcccccagcccctcctccctcagacccaggagtccaggaccccagcccttcctccctcagacccaggagtccaggcctccagcccctcctccctcacacccaggagtccaggtccccagttcctccatcctcagacccaggagtccaggccccagcccctcctccctcagacccaggagtccaggtctccagcacctcctccctcacacccaggagtccaggtccccagtttctccaccctcagacccaggagtccagactccagctcctcctccctcagacccaggagtccaggccccagcccctcctccctcagacccaggagtccaggctcccagccccttctccctcagacccaggagtacagactcccagcctctccttcctcagacccaggtccccagcccctcctccctcagacccaggagtccaggcccagcccctcctcctgcaggactcaggagctgaagtagctgtgggaagcgccagggacagaggtgctctcatgttctcagcacctgttccgcgcctagccctgtgcggggctttacactggatcctcccagctgcccaaagggtcagtatttatccccagtttacggagcaggaaactgaggttccgagaaacgatcgtgttacacaaggtcagaaggggagcgggccccgggccaggcctgtgtgactcagaggcctgctgcctgccccactcgtgtttccactactactacagccctgctattaataaagacacagcaacggcagcgacgcgtaggcgctggaaggatctgcaggaaacaggctgtggcgctggcctctggggagctggaagggacccaaggaggggcagaggtagaacttcctttgctgttcggaggttagattggggaaagtcgcaaacctacagaaaagtagaaaaagtgctgtccgtgcctgtagtcccagctactgggcaggctgaggcaggagaatcgcttgaacccagggaggcggaggttgtggtgagccgagatcgcaccactgcactccagcctgggcaacagagcgggactccgtctcaaaaacaaacaacaaacaaacaaacaaataataacaacaaaacaaaaacaaacaaacaaaaaagtgctgtcatgaacacccattggctaaacttcacagatgtggccacttggccatactttcttgatctttatttctttgtcggcgggggcatacaaactagtttcaagtaaatgataaatattgaagtcttttggaagtggaaatgctgagctgcctggt[131 bp omitted]accccgtctctactaaaaatacaaaattagctgggcatggtggtgtatgcttgtaatcccagctacttgggaggttgaggcaggagaatcacttgaacccgggaggcggaggttgcggtgagccaagatggcacgattgcactccagcctgggtaacaagagcaaaactctatctcaaaaacaaacaaacaaaaaagtctggcaaaagaaaagaaaatgtgtgtgtgtgtgtgtgtgtgtgtgtgtgtatgggggggtggtgggtgggtggtgagacaagtgagagggaagggactcattttattcctctgtttctggttatgctggaaattttccttcatgaaaagctacaagttataaactaaactacaggcattgtgatgaattgtgcccaaacatttgagagtacctatctgtaaaagtaaggaaaatttctagctcagctacagtaaaattgtcataatgacttttttaacaaaattgaagatgaggccaggtgtgatggctcacgcttgtaatcccagcactttgggaggctgaggcgggcaaattgcctgaggtcgggagttcgagaccagcctggccaacatggtgaaaccccatctctactacagatacaaaaattacccagtcgtggtggcgtgtgtctgtaatcccagctactcaagaggctgaggcagaagaatcgcttgaacccgggaggcagaggttgcagggagccgagatggcgccactgcaccccagcctgggcgacagagcgagagtctgtctcaaaaaaataaaattaaattaaataaaaaataaaaaatttaagatagggtcttgctgtgttgcccaggctggtctcaaactcctaggctcaagtgatcttcctacctcggtctaccaaagtgctgagaatacaggtgtgagccacagtatccagcccaacaatttctcgaaatcagataataacaagtctgtcttcagtttctcacatttatttttttttaaatgccttggctgggcgcggtggctcatgcctataatcccagcactttgggaggccgaggcaggtggatcacctgaggtcaagaattcgagaccggcctgaccaacaaggtgaaacccccctctctactaaaaatacaaaaattagctgggtatggtggcaggtgcctgtaatcccagctactcgggaggctgaggcaggagaattgcttgaacctgggaggtagag[137 bp omitted]atcccgtatgactttcagggaactttttaccactgtgccttttacattatttgaatttttcctgtgagtatgtgttattcaaaaaattttaatgaaataatacagtgatgatgatacagtaatatagtaacactcggtgcttacttggtgccaggccctggtcacgctctctcggtctctctctctttttcacttaagactttgtggagtcctcccaacaagccctgggtcggtagaatgatggtttccaatttcctgatggggacagtgaggcatgaagcagcagagtcatgggccacagagccgcagccagggagaggcagagctgggatgccttgagatctggtgactccaggctcctctgtgccccctgcccacgcagctcccgtgaggccgacctcaggtgcccggcccggctcgagctgagctcctccactggagacccggggctggctgtgcgccgacaggcaagcgcatctgctaccctagagccggccacctgggtcccccgggaggagagtgagaggggacgctgcgggcctccagccctcccccagacgctcgctggtgatccgaagagctttgcacctccccatttagtaacgccgctctgcggggtcacccggagtgacctcggcacgcaggtgtggtgggggaggttgcagtcctgcagccccagggtacacacacacccctcattaaagctgggcggtgtgcctctctcctcccctccgtcctgcccaccagcctccgaggcctccttttgtgaccgtttcctggctttgtcccctcctggccgaacgagggcacacaagttaagtgtgttaacaacaacagcaataataatagtgtccaacactcatactgtactcggtgctgtggcttgtgttttcatctattattgtcattgttgcgaagagtttttgcagggatggggtctcactatgcggcctctaccctctcactatgttggaattcgaggctggtcttgaattcccgggatgcctctgcgcttcagttttctcctgtctgaaatgcaggtcatccccagctcctacccacagcgctgttgataagaaaattgatatgtataatgcatatactaatgtacattataatattatatctaagataattattttagatatgatatatactatcctatattatatattaagtgatatatgtagtatatatcttttgtataatatatatacttatatgttatttttaaagtaaattcaattaagaaaatatatactgaaagaacatataaaaattaatttacacttcaaagattgttcagttgacaatgtaacccacccaccatcacactccatccttgggccaaaaaaggtgaaaagaaaaacagaaggaaaaaagtgttaacattaaactgatttgctttatctggaacgagttagattataaactagtagaccaaaatctcagcctttaatagtcatcctgatgagttaaccaaccttcgcaggaaaggtggaaatgttttcactcctgatttttatttttttattgttgtttgtttgtttgtttgttttagacggattctcactttgtcacccaggctggagtgcagtggcccgatctcggctcactgcaacctccacctcccgggttcaagtaattctcctgcctcagcttcctgagtaaagtgctgattacaggtgtgaaccaccgcacccagcccactcctgttttttttttattttgtttttaagacagggtctcactctgacatgcaggctggagtgcaatgacacagtcacggctcactgcagccttgacttcctgggttcaagagatcctcccacctcagccttccaagtagctgggatcacaggtgcatgccactgggctgactaccttttaagttttttgtagagatgggatctcactatgttgcccaggttggtctcaaacttctcgcctcaagctatcctcttggcctcggcctcccaacgtgctgggtgggattacaggtgtgagccatctagccctttgctcctgttttaagacagtaatgctattttctttctattgcaccatgtatacgttgaacaaatattgttaaataaaagaatggatgaaaacacaagccataccaccaagcatagtgaatgcttaacaattattattattgttgttgacaaatgcgcttacagcagttactatgggccaggtactgttctggggctttgtatacccttgcagtaatctcattaaatccttatgttctacctatgacataggaactattatttcccgaggcacagacaggccacacgtgctaagtcttatcgccgtctctgacctgctcacacgcagcacaaaaccttgctgggattctctgtgacatgaaatatttcacgcatatcccccaaatataatgagtattcatg[135 bp omitted]aaccctgtctctactaaaaatacaaaaaattagctgggtgtggtggcgagcacctgtggtcccagctactcaggaggctgaggcaggagaaccgcttgaacctgggaggcggaagttgcggtgagccgagatggcgccagggctctccagcctgggtggcagagggagactctgtctcaaaaaaaaaaaaagaattctcactgcaaaaaaaaaaaaagaaaaaaagcatgtgaggtaatgcatatgttaattatacagcttgatgtagctattttccaatctgtgtgtgtatgtgtatatctatataaacatcatgtgagccagacatggtgggacacgtctagtctaggaggctgtcatgtcatgtctgtctaggaggctgaggcatttctcgaggccaggaattcaagagctggagatgcactggtgaaaaacacgcatggcactccagcctgggcaacgtggcgggaccctgtctttaaaaacaatagaaaaatcatgttgtacacaacaattgtatacattctttatttgtcaaggtggaacaaaaaaaaaataataagagcggaaagaacaacaacaataacaaaagagtgcttttgcaggtgcgcccagagctgtgaaaaacgtgagttgccaatgcacacatccccagctgaggctgaagaaagcgatgctccgccttttcgtgtcagccgctcctacaaacaagcgtctcttttttttatgttggtgctgcgattttcacatttttgtggtttttgttggtgattctgcaggtttgtgctttttgttggtgattctacacttcagctcccacgcacagcgctgaacagggtccccttcagtgcttaggaatgttctgcagtgcctcacatagaaaatctggcctggcacgggggctcatgcttgtaatcccagcactttgggaggccgaggcaggcagagcacttgaggtcaggcatttgagaccagcctggccaacatgatgaaaccccatctctactaaaaatacaaaaattagctgggcatggtggtgcacgactgtaatcccagctactcgggaggctgaggcagga[134 bp omitted]gagagagagagggaaagaaagaaaaagaaagaaagaaagagtccatgtgtgtcagatgaacttcattcaggtatgagctgtactcctgctggcggtgagttcaatgacaatgaatcaacaacgtgtctgtaaaagatgtctttaaacagaaaggcaaagtcagtgaggtattgattgtttgatgaagatgttgtaaccagcggcctgcaggaatctaaccctgtatttcccccagtggcaatggcttggtatttgccagtttggtgttctcagcaacttcaaggaagatagccaccatgaataaggagaatcgagtgtgtcgagtgaaatgaaacatatcatcaggactattttcaccttgtttgcatttacttttgtaaaaatagaaacacacagtttggcagacaacatcggggattacagatgccaccgaatcagctatggatctctctagaagtctgcaggtcacaggatgagagttattacattctccatcccctgaagctgttccccagacctcaccctctcctgtgtggatcaccatcccagcttatcagcttcttcctggcctcccctctcgcctctggactgccccgtctgacacacaaaggttctccctccttccctcccacccctccctcctccttccctcctttctttctctttctcttttcttttccttttctttcttttctttctttctctttctctttctttcttttccttccttcttccctttcttcctttctgtctttcttctttctttctctctctctttctcctttcctgtcctccttccttccctccctccctcccttccttccgtctttccgtccctcccttccctttcttttttgaggcagggtctcactccatcacccaggttggaatgcagtggtgcaatcacagctctctgcagccttgacctcccatacttaagtgatcctcttgcctcagcctcccaagtaactgggactacaggtgtgcaccatcctccccagctaattttagaattttctatagatacaggctctcactatgttgcccaggctagtttcaaattcctggattcaagtgatcctcctgcctcagcttccaaaaattctggtattacaggcatgagccaccacaccggccatcattctaacactcacttctggcccaggccctctcttcctcagtagcctcccatggctccctattgctcttgggatagagttcacactcccccgcctggcctccgagcccttctggagctgcacctgttgcaacttatttccacccggctcatctcacccaacacccaggcaatggaagaactcggaatgtccgagcacactggactctctctctgtttctcaggaaacgtgtgtggaatgaggagacggatggatggccgaacatggcaggtttgtaatggcttcagaaaccccatgtgattaataattatagccagcatttactgaacatattaccagccccagtgctaatcctcccagcaccctggggaggtggccctgttattagctcggcttcatcattgaggaaagtgagactcacaaagactaagcctcctgcccggtgtctcactatagatcagcagcaggagggactcaaacgccaatcaacccggcagtgcacaccctcggcctctctgctattcgtagatgtttgtgggccaggagccaggggcaggtgtaggccaaggttgctgacttctcttctttccattcaaacacaacacacatttcctggggactttgtatgcagagccctgagctgaggctgggtgctgggagaccacagacagactctgtccctgctccggaggtgcccagaaggttctgtgaaccaggatacagccgccaagaagcaaggtgtgcctcttccaaaggcgaccaagaggggcctagaagtggctctgagccaacctgacaggaaagttggcaggtgaggaaggggttcagagacctggcggataagtaaattaacagtagcaagagaggccaggccagtggtgactgggattcaaattaaaacaagatcgattaaataatgattgagggccaggtgtggtggctcatgcctgtcatcccagcactttgggaggctgaggcgggtggatcacctgaggtcaggagttctagatcagtctggccaatatggcgaaaacctgtctctactaaagatacaaaaactatccgggcgtgctggtacgcacctgaagtcccagctactcgggaggctgaggcaggagaatcgcttgaaaccaggaggcagaggttgcagtgagccgagatcgtgccactgcactccagcatgggcaacagagcgagccgccgtctcaaaataaataaattaatttaatttaattaacaataataaataacaatggatacctacctgctaccacgccggactcaagcgttgctgcagcatctgggacacacctcaaagcgaagccgactccagccctcgggaggatctgcagagacaggaagcagatctgcgcctgcctaggacatggggggcaggaggcaagtactggggggctatggctaaggggtgcaatgtttcttttgggggtgatgaaaaacgttttaaaattgtgttaggccgggcgcagtggctcacgcctgtaatcccagagctttggcgggtcgaagtgggcggatcacaaggtcaggagttcgagaccagcctgtccaacacggtaaaaccccgtctctactaaaactacataaaattagctgggtgtggtggtgggcgcctgtaatcccagctacttgggaagctgaggcaggagaatcgcttgaacccgggaggcggaggttgcagtgagccgagactgtgccacagcattccagcctgggcaacagagcgagactccatctcaaaaaaaaaaaaaaaacaaaaagaaaacaaaaattagccaggcgtggccgtgcacacctgtaatcccagctactcaggaggctgaggcgggaaaaacgcttgaacctgggaagcggaggttgcagtgtgccaagatcacaccagtgaactccagccggggcaacatagtaagaccctgtccaaaaaaaaaagattgtgttgatgtttgcacaaactctaggactataccagaaaccattgatttgtctactttacacggtgaattttatggcatatgaattacatctcaataatgccagtaaaaaaaatttggcctatagccaggcatggtggccagtgcctgtaatcccagatactcgagagactgaggcaggagaatcacttgagaccaggagttggaggctgcagtgagcccagactgtgccactgcactccagcctgggcaacacagagaaactctgtctcaaaaaaaaaaaaaaaaaaattggaacctgcattttagtgagtgagggaccagagcaaacacagcctgtgagatgcccagatcattttaaattttatttatctttttgaagcaggatctcactctgtcacccaggctggagtgcggtggcatgatcagagctcactgcagccctgacctcccaggcttaagtgatcttcctacctcagcctcctgagtagctgggactacacatacatgccaccatgctcggctgattttttttttggtaaagacaggcgaactctcactgtgttgcccaggctggtcttgacctcctgtgctcaagcgatcctcctgccttggcctcgcaaagtgtgctgggattacaggtgtgagctaccacatcaggcctatttttaacttttaacaccccctcctgtatagaagaactattttcaataaccatcatgtaataatcacctgcatctttttcttgactgctgggggggtttcttcctttttttttttttaattaatagactttattttttagagcagttttaggttcacagcaatattgagcagaaggtacaaagatcttttttttgagacagagtctcgctctgtcacccagtctggagtgcaatggcgcgatctcggctcactgcagcctccatctccccggttcaagtgattcttgtgcctcagcctcccgagtagctgggattagaggcatgtgccaccatgcctggctaatttttgtatttttagtagagacggggttttgtcatgttggccaggctagtctcgacctcctgacctcaggtgatctgcctacctcagcctcccaatgtgctggaattacacgcatgagccaccgtgcccggccagaaggtacaaagttcttctatactccctgccctgcccccactgcctcccccactatcaacatccccaccagggtggtgcatgggacacaccatcatcacccacagtccacagtgtacatgagggctcgctcccggttcatgacgttgtatgttctgtggctttagacgaatgtataatgacatgtccccaccactatagtatcagacagagtatcatagtttcactgccctaaatatcccctgggctgcacctcctcacccctctctccctcctagctcctggcaaccaccgatctttttcctgtctctgtagtttcctcttttccagaacctcgtattgttggaatcaaacagtaagcagccttttcagattagcttctttcacttagaaacatgcgtttaagttctcgccatgtctttttatggcttggtagctcttttttttttctttcagtaaaacctttcattgtcatctcatttctttttattgcttaataatattccattgtatggatggaccacggcttatccattcacatattgaaggacatcttggttgctttctttctttttttttctttttgagacggagtctcactctgtcgcccagactgaagtgcagtggtgcgatctcagctcactgcaacctccacctcccagattcaagcgattctcctgcctcccgagtagctgggattacagccatgcaccgctatgcccggctgatttttgtatttttagtagagatggagtttcaccag[137 bp omitted]gtagacattcacatgtgggtttttgtgtggacataggttttcaactcatttgagtaaataccaataagagtgattgctgaattctggtttatttatttatgtatttttttttgacatggagtcttgctctgtcacccaggctggagtgcagtggcgcggtctcaggtcactgcagcctctgcctcctggattcaagcaattctcctgcctcagcctctagagtagctgggattgcagcacatgccaccacacccggctaacttctgtatttttagtagaggcggttttgccat[243 bp omitted]tctactaaaaatagaaaaaattagccaggcgtggtggcgcatgcctgtaatcccagctactagggaggctgaggcaggagaatcgcttgagcccaggaggcagaggttgtggtgagctgaggtcgcaccattgcactgcagcctgggcgacaagagtaagactccatctcaaaaataataatatatatatataatttttgtatattatatataatttttgtatattatatatatgtatagtgtttttgagggagacatatttaatcattgaccttgtttacaattgctgcacttggtgacactgaaaagcagaccaagctgggcacagcggctcacacctgtaatcccagcactttgggaggctaagacaagaggatcacttgagcccaggagttcgagaccagcctgggcaatatagtgagtacccatctctatgaaaaaaaacatcgtaataaaatttagaaattagaaagaaaagcagaccaaacttttggttggtcattttattgttttcacctcctctatagccaaaacctcccttattgcctgcgtctggagcaggccagttctgctacctgtccaccacctggtaagcccctatagggagaccccattcacacccatcagagaggaagaaattgggaagtggttgaggacatggggaagcagggagctggaggcattgctggtcaagggaggggggtagactggtgggggagatggaggctgtagcggggaaatgggtctgaggcgtcctcttctgggtgtacacccctgagagatcttcccacatgtcctttgccacatcatgtgtgtgatgggaacggaaggcagtcgggaagcgccagacagcttctgtttgtctatctaagtctcctctctgttggggtgacaccctctgcctggaaggcatgcagccaactggactccacctggcttctctttgggttcagtcaacgggagacttcagcagatgatgcgaaggtgtgaggacaggtgctatgctgtccagctctctctccactgggctgcagtgtggcggggcgagggctaatgatggccatgctatgagtcagctggtgccatccacgccactctctgcaactgaaatttgaaaattataagtaattctaagaaaacaaagatatatcatcacattgagtgatgatggagactagacacgtggagaaattgcaaaggatatgcctttgacaaatgtcagcctttatttatttatttatttatttgagacagggtcttgctctgttgctcaggcaggagtacagtggtgcaattagagctcactgcagcttcgacctcgggtgttcaagtaatcctcccacctcagcctcccgtgtagctgggactacaggtgcattccaccaacaaccacacctacctaccttccttccttccttccttccttcctctctctctctctctctttctttctttctttctttctctttcttgttttagagatggcgtctcactatgttgctcaggctggtctcaaacttctggcctcaagcaatcctcctgccttttccttgcaaaatgctggtattacaggcatgagccaccacacctgactgccagttattattatttaacagtgaaacaacaatagtggggtggctaaaaggataaactctagagccaggctatctggctttaccccccatccctgccacttactggccttgggcaaacatctctgcctctctgtgcctccatttcctcatctgtaaaatggggataataacagtatatatcacctaggcttgttatagaaattaaatgggttaatacatgtggattagcttctactgctgaagttaccttcaaaacgtagctgctcaaaactacacccatttctcatcatttctctgggttaggaggctggacccagctcagccaggtcctctgtttcagggactctcataagcctgccatcaaggcatcagctaggctgaggtctcatctgaaggctcaactggaaagatctgcttccggactcactcctgtcttggctagagttggtttctcacaggctattggactgggggtctctgttcctcacaggctgttggatagagatcactctcagttccttaccccgtgggctgctctatagggcaattcccagcatggcagctggccccatcaaagccaggaagccaagccaaaaagagaaagtgggggtgatggtgggaagagaaagagaaacaagacaggaatcatagtcttttgtaacctaatcttgagagtgacatcccatcactgttcccctattctattaaaaatcactatgtccagctcaaattcagaggaaggggattactcaaaagtgtgagcactgggaggcagggaccactgggggccttttcagaagctgcccactgctacatataaaagacttagggccaggtatggtggctcatgcctgcaatcccagaactttgggaggccaaggttggaggactgcttgaatccaggagttcaagactagcctgagcaacatagtgagacattgtctctactaaaaaaattttaaaattagctgggtatggtggtgcatgcctgtagtcccagttacttggaaggctaaggtgggaggattgcttgagcccagaagtttgaggctgtagtgagctgtgatctgtgattgcatcactgcactccagcctggacaacagagtgagattctgtctctggaaaaaaaaaatttatatatatatatatatatatatttctatatatatttttttatatatttctatatatatatttctatatatatatatatatatatatatatatatatatatatatgttgaagtcctaaccctcagtaccacagaatgtggccttatttggaaatcgggtcgttttgatgaaattagttaagatgaggctgtactggagaggaggagtcctactccaatatgactgctattcatatacacaagggagatttggacacagattcccacatagggaggatgcctgtgccgatgaaggccgaggctgaggtgatgcagccacaggccaagggatgccaagggtggctggtgacaccctgggcaacaaagtgagaccccgtctctacaaaacatgaaaacattagccgggcatggtggtatctgcccgtagtctcagctactcaggaggctgaagtgggaggatcacttgagcccaggaggttgaggtcgcagtgagccaagatcgcagtgctgcactccaacctgggtgacagagctagaccctgtctcaaacaaacaaacaaacagattgctggcaaccactggaagctagggagaggcaaggaagcactcccacagcaaggctgttcaacctgcagcctgcaggccacatgtggcccaggacaattttgaacgtggcccaacacaaattggtaaactttcttaaaacattatgagatttttctttttgcatttttgcatttatttatttattagttcatccataattgttggtgttagtgtatttcatgtgtggcccaagacaattcttccaatgtggcccaaggaagccgcaatcttggacacccctcccatacaggcttcagacggagtatggtcttgctgacctcttgatctcagacttccagagccctgggacagcacccttctgtgggtttttttttgttgtcgttgttgttgtttttgtacaaagtttcactcttgttgtccaggctggagtacaatggcacgatcttggctcactgtaacctccgcctcctggggtcaagtgattctcctgcctgagcctcccgagtagctgggactacaggcgcccgccaccacgc[176 bp omitted]atcttatttattattattattattttagagatggcagggtctcactttgttgcctaggctggtctcaaactctaggctcaagcgatcctcttgtctcagcctcccaaagcgctgggattccaggcctgagccaccgctccccgcctgaacttggaacattaattctacctggggtaaatctgcacctagagcagcgtctgactgaagggctgggagcggggatgtgagcacccggggaacaggggtcttgaggaccctcttagaattgtgcccacagcagggactgatagagagagagatggttgtgggaggggtagggaaggtcgtgggggtgtatgtaaagggaggcctgaaaccaagggtgggaggtcattccaggcaaagagagttgtccgtgagaggccgcagaggagagcgcgtggcctgtgctaggaaccgacagagtgctggagattaaaggagtgaatgatgtgtgtggagtggctggcactggtgagcgggtgaggtaataaatagcagcagggttattatcccactgtcagaaggctggaggctgcccaaccgcttcactcccgcgctccgggtctgtctgcccagggctttctctccctctctctctgtctctgtctctccctctctatctcctctgtctttctgtctctcttcccatctctctgtctctccctccctttctctccctctctcgcactgtctctctgtgtgtctcttcctctctctctctccctctctgccccctctgtctccccctctctgccccctctctcccccctttactgccccctctctctcttcctctctgccccctctgtctccccttctctgccccctctgcctccccctcactgctccctctgtctctccctctctgccccttctctctcccccctctaccccctctctctccccctctctgccccctttctctctccgtctctgccccctctctctctccctctctgcccctctgtctctccctctctgacccctctgtctctctctctctgcccctctgtctctccctctctgtcccctctgtctctcgtgatctgccctctgacctcacgatccccctgacctcgggatctctcgtgatccccctctgacctctctgcccttctgtctctctctctctgcccctctgtctctctctgtctgccccctctgtctctccctctctgcccctctgtctctccctgtctgcccctctgtctctctccctcccactgtgtgtgactttgggtgggtccctctcctctccctggttcctcatctgcttccaagactgccccctccctccctgagcccaaagagccgatgcctggggagggcccagcctggactaaggcccagcggcgggaggagcctgggttggaggccgggagcagtggggcgaacggcagcaaatatttatggagccaggtctgtgccaggctcagggctgggtgtggcgagataagggggccaggggaggcgcccggacttggcctccaacccgcttgccccagggaggccgggagccgggcagggggaggtgcccgggaaggagggctgggcgctggggtcgtgcaggcaggggtccccgtggagcctcgggcccctctggagagtggttcacacttcataggtcagctccagcctggttggtatgaagccttctcccacgaagaagccccgagcactctcgctgcggtggcacctcccggctgtccccggcttccccttgggcaccagtctgtgttttgttaatagcacctgaggtggaaacagatgggcttcaaggaagcaagtcacatggaattggacccgaatgcagattatcaaataagtatctgtgtgtctacactgatacaaagaaatacgaggatgaggccgggagtgttggctcacgcctgtaatcccagcactttgagaggccgaggcgggagcatcacctgaggtcaggagttccagaccagcctggccaacatagtgagatccctgtctctactaaaagtacaaaaattagccgggcgtggtgttgcgcgcctgtaatcccagctactcgggaagctgaggcaagagaatcacttgaatccaggaggcggaggttgcaatgagccgagatcgcaccactgcactccaacctgggcgacagagcgagacttgaaagaacgaaagaaagaaggaagggaggaaagaaggaaggaaggaagggagggagggggaaagggaaagaaagaaagaggcagatgagcgagttagcaggaaaaggtgaaggaacacatctctcttacagaataaaatttttttttttgagacagagtcctgctctatcccccaggctggagtgcagtggcacgatcactgcaaccactgcctcctgggttcaagcaattctcctgccgcagcctcccgagtagctgggataacaggtacgcgccaatgtgcccagctaatgtttttttttttttttgacacagagtctcactctgttgcccaggctggagtgcggtggcgcgatctcggctcactgcaagctccgcctccagggttcaagtgattctcctgcctcagcctccccagtagctgggactacaggtgcccgccaccacacctgggtaattgtttatatttttagtagagacaggatttcaccgtgtcagccaggatggtctcagtctcctgacctcgtgatccacccgccttggcctccgacagtgctgggattacaggcgtgagccaccgcgcccggctgtattcttaagaactgtctatctactcccccattctgaagaagggagcttaattcccccacagcccaaatgccccgtgggctgcactcggcggcttgtttacaaagactagatgaatggaaaggaaggggggtcacatacagtggggagagctggcaaacaccacccctgccaggtgaccagggtggtcaagcatgggtgagcagacatgagaacacgcacctcctgataggaggcgaagagaagggattttttttttcatactaaaaaaatttttttggctgggcgtggtggctcatgcctgtaatcccagcactttgggaggccaaggtgggtggatcacctgaggtcaagagttcaagaccaacctggtcaacatggtgaaaccccatctctactaaagattaaaaaattagctgggcatggtggcgcacgcctgtaatcccagctacttgggaggctgaggcaggggaatcgcttgaacctggaaggcggaggtcgtagtgagctgagatcatgctactgcactgcagcctggacaacaagagtaaaactccatctcaatttaaaaaaaatgttttttgaagagaaagggtctcactgggttgcccagaatggttctctaactcctgggttcaagcgatcctccctcctcagcttaccagatagctggaactataggtgtatgccaccaggcctggctaatttttaatttttaatttttttttagaggtggtgtcttgctatgttgcccaggctggtctcaaactcctggcctcaagcaatccacccacctcagcctcccaaagtgctgggattacaggtgtgagccaccttgcttggcccagaggggcattttgtgtgtgtaactgtcgtcctagctacacgggaggctgaggcaggagaaccacttgagcccaggggttggaggttacagtgagccaggatcacaccactgcactcctgcctgggcaacagagcgagactccatctcaaaaaaaagaggtttttttttttttgcgtttttgttatttattgattgatttatgtattagttcatcagctgttagtgtattttatgtgtgacctgagataattcttccaatgtgggccagggaagccacaagattggacacccctgccctgcaggcttcagaggcagtgtggccctgccgacaccttgaccccagacttgcagccccagatccctgggacagcacacttccgtgctctgctttgccaggactgctctaaactgtcaaagtcatcagaacgaggcaagtctgagaaacagtggcagacagtaagagattaaggaggcatgacggtgagacgccatgtggtatcctgggtgggatcctgaatggaaaaaggtcgttcgtgacatctgagtaaagggcagagttttgtgctgtactagtgtttgcttcttggttttgacagacgtgccatggtaatgggagacgagaacatttggggaaattgggtgaggggtctgtagcaagtctactatcactcactgcagctctactatcccgtcttaaatgtttctaaacaaaaaagtttatgtaagaaagaaaaccaggtgggcttatgggtacttttgccacactccccaccaggctattcacacagaagccagggagaatctgtcataccaggagaggggagtttgtgttattcaggtgtatgtctttgtccaaatgtatcaaatggtaacttgggaaatgtggcatttcactgtattttaattttactaatgacaagaagcttaaatatttgatatcttgttatgttatgcatgctaataaaacatcaaacaaaaaagaaaaagttttttaaaaaccaaaaaaaaatgttatgcatgctgaagtgtttaggagtgaactgatatgttgctttgagaattgcaagttgcatagagaaagatgaatatatgagaactctctgtgctttctgttcaattttgctatgaacctacaacttctctaaaaaataaaatgtattaattttataaagatggatgatggatgaatcaatgatggatagatggatggatgatgcatgaatggataggtgaatggatggatggatgatggatggatgaatggatggttggatgaatgggtgaatggatggatggatgatggatggatgaatggatgaatgggtgaatcaattgatgaatgaatagatggatggatgggcagatgggcagatggataaatgaatgaatgaatggatgggtgaatggatagatggataggtgaatggatgatggatgaatgaatagataatggatgatggatgaatgggtggatggatggatggatggatggatggatggatggatggatgaatgggtggctaaatggatagatgcatagatggatggatgatggatggataggtgaatggatggtggatgaatgggtggatgggtgaatgaatggatggatggttgggtaaatggttggatgagtgagtagatagatggatggatgatggatgagtgaatggataaatagatgggtaaatgatggatggatgggtggatgaatagatgaatagatggatggattatggatggatgtatagatggatggctgatggataaatgggtgaatggatgaatggataatggatggatggatgggtgtatggaaggatggatggatgtgggaatggatgggttcatggatggatggatgaatgtagagaatgggtacatagacattcgctgcacaattatttttatttccttatgtttttatatttttataatgacacgctaaaaggaaaaaggaacgtcgaatcctgtcagcctctgcatgaattcctccaagatttccatctcattttgatcagaaattgggttctcatgactctctacccaatctggtaccccatcacctccttgatctcctctcccattgctccctcctttgctcactcctctccagccacattggcccctctgctccttgaacactccagctatgtcccctcctcagaacttttgcatcagatgtgcccttcctctgggacacatcccagttatctgcactgctctctcgttcagctcttggcctacacaactgaagttcctacatgccctgtcttgcattgtctttctccatagcatttctctttctctaagacgttttataatttactttcttgctatgttttcttgcctgacttccctcactagaatggaagccccacctaaagagggattcatctattttgttaaccaatgaataagctgcaccttggacagtgcctggcacatagtagaggctcagtaatgagttttaggatgagtgaatggaagactgaatgaggccgggcgcagtggctcacgcctttaatcccagcacttttggaggctgaggcggacagatcacctgaggtcaggagttcgagaacagcctggccaacatggtgaaacctcatctctactaaaaataaaaaaattagccgggagtggtggcacatgcctgtaatcttagctactcgggaagctgaggcatgagaatcgcttgaagccaggaggcagaggttgcagtgagctgagatcgtgccactgtactccagcctgggtgacagagtgagactccgtctccaaaaaaaaaaaaaaaaaaaaaaaacttaatgaatgaggtaaggatgaagcattgtgtaaagtttaaaagcccaggctttgcagtcacaatgcctgggatcaaatctggcatggtacttactagctgtgtggccttggctaattcatttcacatttctgtacttgagttttctcaggaaagcagggcctactgggaacctcataatcgctagtgggctgtaaatggtacagccactttgggaaacagtctggcactttcttaaaaagtgaatcacacacttcccacacagcctagcaattctgctcctagaaatctgccccaaagaaatgaaaacatatgcccacacaaagacctgttgctgggcgcagtggctcaggcctataatcccagcactttgggaggctgaggcaggtggatcaccagaggtcaggagtttgagactagcgtggccaacatggtgaaaccccgtctccactaaaaatgcaaaaattagctgggtgtggtggtgtgcccctgtaatccctgctactcgggaggctgaggtgggagagttgcttgaacctcagaggcagaggctgcagtgagccgagactgcacaccactgcactccagcctgggcaacagagcaagatcccgtcaaaaaaaaaaaaaaagaaaaaaaacaaaggccgggcatggtggctcatgcctgtaatcccagcactttttggaggacgaggcaggcagatcatgaggtcaagagattgagaccatcctggctgacagggtgaaaccctgtctctactaaaaatacaaaaattagctgggtgtggtggctggtgcctgcagtcccagctactcaggaggctgaggcaggagaatggcatgaacccgggaggcggagcttgcagtgagcagagatcatgccactgcactccagcctgggcaacagagcgagactccgtctctaaacaaaaaaaaaagacttgtacatgcatgttcacagcagcattacttaaacagccaaagagtagaaacaatacaaacacccatcaacggatgagaggataaacaatgtgtggtgtatccatacagtggaatattattcagctgtaaaaaaggaatgaagagggtgggtgcaatggctcatgcctttgatcccagcagtttgggagatcaaggtgggaggattgcttgagcctaggagttgaagatcagctcgggcaacatagtgagacccccatctctacaagaaataaaaatattatccaggtgtcatgatgcaccctgtggtcccagctgctcaggaaactggggagagatggatcacttgaggttgaggctgcagtgagccatgatagcaccactggactctagcctgggcaacaaagtgaggccttctctcaataacagcaacaacaacaactaaaaagcaattaagtactgaactgacacaatttacaatgtgaatagaccttgaagacattatgctaagaggaggaaggcagtcaccaaagctacatatggcatattccatttatatgaaatgtctagaataggttcatccatagagacaaaatagattcgtggttgcccagagctgagggtgggaatggaaaatgactattaacaggcacagaatgtctttttgaggtgatcaaaatattctttttaaaatttttaattaattcatcaatttatttattattattattattttttagagacaggatcttgttctgtggccttggctggagttcagtggtgtgatcatagctcactgcagccttcaactcatatagctcactgcagccttcaactcctgggctcaagacaccctcccacctccgtctcccaagtagctgggattacaggcacttgccaccacagccagctaatttttgttcaatgttttgtagcgacagggtcttgctttgttgtccaggctggtctcaaactcttggctccaagtgctcctgccgcctcagcttcccaaagtgctgggattacagacctgagccaccacacccagcctggaaatattctaaaattgga[134 bp omitted]aaaccccgttcatactaaaaatacaaaaaaaaattagtgaggcgtagtggcaggcacctgtaatcccagctacttgggtggctaaggcagagaattgcttgaacccaggaggcggaggttgcagtgaaccgagatcaagccactgcacttgagcctgggcaacagagtgagactctgtctaaaaaaaaaaaaaaaattatcgaattgtacgaccaaatggatgaagtctatatgtaaatggtacctcagtaaagctgtttatgaaaaggcaaaacgaaaacagagccaataatagtatctattttatgtggctgttgtgaggattaaatgggctaatctacgtagtacccttgaagcagacatagggtgaat[139 bp omitted]atggagaaaccttgtctctactaaaaatacaaaattagccgggcatggtggtgcatgcctgtaaccccagctactcgggaggctgaggctggagaagcacttgaacccaggaggcggaggttgcggtgagccgagatcgtgccattgcactccagcctgggcaacaagagtgaactccgtctcaaaaaacaaacaaacaagcaaaaacaaacaaatgtggttgcgatcgtacgtgtaaagtgttcagcaagtgaaagacaaatggcaggtcgtgttccctacataaccacaactccttcaataatcaccgtcatttggtgactttatcattctctgcatctgtcccacgcatctggcctcagttttccacctgcgcaatgaaaaagctgggctctatctccaaggccgtcttctctttgtcaattctgtatttggttctgaaaatgtttctcttcgaggcggcagatctgcaatgagaagggtgggcaaacccatagagccgaggtggggcccgcgggtcctggagaccaacatgtgtgtaggaaggggcctgaaagtgggctgtgtggtgggagctgacggggagggtaagattggcctgggtaagggttcgaggaccaggtctgccaatttgtaaccgtgatatcttggacaaggaacttcctctctgcatccagaaaatggggagggtgtttcctgcctccccgtggagcagtgaggattcattgagatcatgtatataccagccagggagaataatagctaaaagtaccaacagcaacaaccaacagcaacaactttttctctccatttttttttttttttttttttttttttagctctgtcacccaggctggagtgcagtggcatgatcttgactcactgcaacctccacctcccaggttcaagcaattctcctgccttagcctccccagtagctgggattacaggcatacgacaccatgcttggctaatttttgtatttttagtagagatggggttttaccatgttggctaggctggcctcgaactcctgacctcagatgatccacccacatcagcctcccaaagtgctgggattacaggtgtgagccactgcgcccggccaacagcaacaactacttaccaggcccaagcactgtcttcagccctttccactaagtaacccatttaatatgcaaggctcatttcatagtagtgattactgaagcaggacaaatggcttctttgctttaagccccaatctggcccttctataagtagagctatgtaattccctcgtttgatgggttttgtccatgacattgtatggataaggtgtctggccatggtaggctctcactaaataggagcccacattaagatatggtaatagggagccactgatggttcctgaggagggagtagctttgatgtaataaaagcagacttcagcctcccatctccccaacacttgacgcttggttatagtttctcataggatctagttctttggggaaccagtctcatttggtaaccctaatctattcgtgccaatattgggttattgttcatctcctgagctggatggttggtgtcaaaagagtgcctaaggggtgtcatcaaatactagccccaacatccagcactgggcttaaactcagtgataaacagttgggacaggccaggtacagtagctcacgactgtaatgccagcactttgggaggctgagtggggaggatcgcttgaggccgggagttggaaaccagcctgggcaacatagtg[131 bp omitted]aaacctcatctctactaaaaatacaaaaaattagctaggcatggtggtgggtgcctgtaatcccagctacttgggaggctgaggcagagaattgcttgaacccgggaagcagaggttgcactgagctgagatcccgccactgcactccagcctggcgacagagcgagactctgtcttaaaataaaataaaataaaataaaataaaataaaataaaataaaataaaataaataaaataataaaataaaataaaataataaaataaaaattagccaggcatggtgatacaaatttgtagtcccagctactccagaggctgaggcaggaggatcacttgagcccaagagatggaggctgcagtgagctatgattgcgccactgcactccagcctgggcaaaaaagtgagaccgtttcaaaaaaaaaaaaaaaatcaaacaaactaatccatacaagccggcacagtgctaagggctcagccaagatgtgtgaaatcattgaaggtggaattatttgaagctttcggtgtcatcctctcccaccttgaccctcaatcaccatctttcttgcttctctgcctcctttgatccatctagtattgttgacgcactggggaaacagcttccctctcagagcttcagtttgttgtcctggaaaagggggaggctctgcccctttcttgctgtttcttgtgggtgtgcaggtacctaagtagtcaacgtcttttttttttttttttttttttttgagatggagtctcgctctgtcgcccaggctgcagtgcagtgttgcaatctcagctcactgcaacctccacctcctgggttcaagcaattctcctgtctc[133 bp omitted]tcagcctcccaaagtgctgggattataggcataaaccactgcaccccgcccatcattatttgcatagggcaagagagaaccatcgaaggtgctgggggaaagcaggatgtcaagagaaggaaagagaaaggtgtttaaggaagattagctgagagatatccctcttccttccactcctggaacctaaataaacgggtaaaaagaaaacaactgggccaggcgcggtggctcatgcctgtaatcccagcactttgggaggctgaggtgggtggatcatgaggtcaggtggtcacgagatcaggagttcaagaccagcctggccaatatggtgaaactccatctctactaaaaacacaaaaattagctgggtgcggtggcaggcgcctgtaatcccagctactcgggaggctaaggcaggagaattgcttgaacctgggaggcggaggttgcagtgagctgagatcgtgccactgcactccagcctgggtgacagtgcaagactccatctcgaaaaaaaaaaaaccaaaaaaacaaaaaaccaaaaaaacccaacaacttgaagatgtgtagaaattgaaacttcccacctcacctccaattacctgcagtttctaaaatatgtagtaatggccaggtgcagtggctcatgctggtaatcccagcactttgggaggctgtggcaggaggcttccttgatcccaggagtccaagaccagcctgggcaacatagggagacaccatctccacaaaaaatttaaaaattagtcaagcatggccgggcacagtggctcactcctgtaatcccagcactttgggaggccgaagcaggaggatcacgaggtcaggagatcgagactatcctggctaacacggtgaaacccagtctctactaaaaatacaaaaaatcagccgggtgtggtggcgggtgcctgtagtcccagctactcgggaggctgaggcaggagaatggcgtgaacctgggaggtggagcttgcagtgagaggagatcacgccaccgcactctagcctgggtgacagagcgagactccgtctcaaaagaataaataaataaataaataaaataaaaattagtcaagcatgatggtgcacacctgtagtcccagctacttgggaggctgagaagagagaatcccttgagccaggaagtcgaggctgcagtgagctgtgatcgcaccactgcactccagcctgggcaatagagcaagatcctgtgtccaaaaaaaaaaaaaaaaatcctgtagtacctacctcctagcctttgcccctgttttttctttgtctggtgttgtcttctcacagatgtttctctctcatacctggttccctccatcttcattcaaatcaaacatcgcctggccagagaagccccaacccccagtcctgctctgccatcatactgtctggtggtttactcttggtagcccttatacctggtgctatattgcatcctgctaggacttttttcaatgatgtaatgttctagatctgtcctgtccaatatggcagccaccag[136 bp omitted]tgtggtgaaacccgtctctactaaaaatacaaaaaattagttggttgtggtagcaggctcctgtaatcccagctactcgggaggctgaggcaggagaatcccttgaacctgggaggtggaggttgcagtgagccaaggtcgtgccattgtactccagcctgggcgacaagagtgaaactctctctctctctcaaaaaaaaaaaaagagtgaagagtgtgactgaggaaccgaacttttacatttatttcatcttaatgtctttacatttccatattctaaatttaaacggaaatagccacgtgtgtctgctggatatcatattggacagtgaagatgtagaatatcccatcatcacaaaaagttctcccagactgggcaagatagcaagactccgtctctgcaagaaatgaaacaatcagctgggtgtggtggcatgcacctgtagtcctagctccttgagaggctaagaggattgcttgggtctgggagtttgagactgcagtgagctatgactgcaccacggcactgcagcttgggcaacagagtgagggaagaaagattatggaaacttttctgagaaaaaaaaaaagttatgttggacaatgcagggctagaattccagctctttcagaggaaggtattggactcctcctcagtgcctagtaccaccgctgacacagagtaagggtgtggtagagattgactgagtaaggcgcggagcttccacagggcagtggtgaggataatcgcgcggagcttccacagggcagcggtgacgatgatctatcttctcacattcctgtttcttctcaacccagccttcaccggcttcttgcttggttgagggccacatattttctgatgcatctgtgtccttcctgctctgaacccaagttcagagttggctggacaaatcctgactcgccccagcgcccccagcctgccccacctccacagaacacctcgctctcttggatttcacgaactcacatttattcacagacagacaaagggacaaggacagacctttgctcactggggacccccagggtctggcagttccaaagaggtgatggtgtccagtgtgtgaaacgggggacagggaggcgggggcgtccccaccagtctccatccctctggccaactgtccgccgcctttttttccaagtcgtcctgccttaagacacatgttggggtgagcggttcctaaccagcatcaggggttctgggggcgggcgatgggggaggaaggggcagtccagggccccccactccttagtgtcaagggcgtgaaggggacgggtgggtagacagaggaggtggctccttcaacttccctcctccattctgcaaaccggggagctcaggcggagcggcggagggcagggcggcgaaggtcaggaggccaggccccccagcccgcgcaggtgagccttgctgtctacctcttcctcctccatctcgaaggctgagtggtcttggctgtcgaaacaggaggcgctgaggaagacagggggagccggcggggactggggtggggtccccggagagggcggctcttccttaatgtttgcgaggggcagcgggagcccttcttcctcctgctcggccttcaggggcggcgggggcggtggcggcgacgtcggggcctgggcctgcagtgcctgcagcgcggcggccctctccagctctgcgcggtggcagcgctggtggcgcaggaggctgtaggcgcgcgagaagcggcgcgggcagcgggggcacgggtgcggggctgggccccccgcgtgcacctgtgcgtggcgcgccaggtcggccaggcgcttgaactcccgctggcagcgcacgcactggaaggggcgcgctcccgagtgggtcaccccgtgctgccgcaggtgcgcccggcgcctgaaacctttgccgcactctgggcaccagaagcggggctccccggcggggggccgagccggggcggcgtcgcctccgttctgcccttctcccccttccgaggcacccccgcactccgccccctcgcccccctccggccccttggctgagttccgtgcacccgaggccttgtcgtccttcttgcccgccgcgggcagcggggccagcaggctgagggggccgtggacgcggcggtgctggcggaggtaggaggcgaggcggaaggccaggccgcagtctgggcacacgaaagggcggtcggtggagtggaccagccggtggcgcgacagggaccagggcctggcgaaggccttgaggcagatggagcactggtgtcgcttggggcgtggcgggggccccccttccccttcctgttcgccctcggggcgcagacacgggtgcgccttgagctcgcccttggtggcgaaggcttcgcggcagcgcagacacagcagcgtccagtctgcctggagcaggacctgtttctcctcctgccgcccggccgccagcgccagctcggccctcagctctgctgccccggcctcggcctcctccgactccgactcccggggctccgcggcgctggtgggcgcagccagcgtggaaggctcccccgcaggccacgtctcaggccacgctgcgaccgcctcctcctccgtggcccctgctgcagcggtggtgggcggctccgagccctcgtcctgcgggccccagctgggttcggccgtctccttggccaccctctcgatggccagctcgacctcgccgcccgcgtgctcctgagccaggtggcgcctgagctgggccggttctgggaaggtgcgggggcaggcggcgcagcgcagcgggggctggggcccgtggccgcgcaggtggcgggaaaggtgggccggccggcggaaggccttggggcacagcgggcaggcgtggggccggagccccgagtggctcagccggtgccgggagaggtagtaggggaaacggaagaggcggccgcaggtggggcagggcaggggcgccctaggggctccagcgccccccctgccacggccacggccccgaccacggcctcggccacggccccggcctcggccacggtgaggtgggctgccctgggcgggtggaggaggctgcggatccatgcctgtggggagagaggggagagatgggaagcggggcagagataaaaagaggtgcgtggggtgtggcagaaagagaagcagagacagtcagagatggagaggcagagagggtcaggtatttagccaggagagagatatgagacagagacaaagatgagagacaccgaggggaggccagagatggagagacaggaggagagagatcagagacagagcgacagagcagggaatagagacaggagaaggcagagatgggagacacagagaagtggggatggacagacagagaccaggagtcgcagaaagacaggatggtgaaaggcagagcagagaagagacagaggagagtgaggaacacccagcagagagacagagacacagagaagaggaaacaaagagacttggagaaccagaggcagagatagtgcaagagcagagatcagaagagcagtggcgggttgggggccggagagacagggagacagagacacagagggagtgaactgggcagaggcacggagggggacaaagtcagcgaaccgcttctgctccaggtcccccggccaggctgaacgttttgggaggggctgggacacagcccatggggcctgagtggagggggtgggatttgaagccggtaggccccggaaatagagtgtgttctcagatgccaggggctgggagaggtcggggagtaggagggttcagacttctggtctgagttgggagggggctaggggcccagactcttgggactgatggggatgggagctggggattgagactcctgggtccaggtcatgacggattggggaatctggactctggtatggaggaggtgtggattcctgggtcccggtggaggaggggctggggagggggctgggctcccaggacaagggggaggcgggggctggggacccagctgccgggaatccccagggaggaggcgactgagggccggacccctggactcgggagggaggctggtgggggtcgggggtcccaggtcctagaggggggccgatctcctccgggccaagcctgcagctccccgaaggcatgatcagcagaattggggccgggtcgaggccttgaggatttctcagccctgggcctggggcttggtcctggtcgctggggctgggttcttacctcgcctccttggctcctttcttccttccccacggccggccaaacgcggacggtggtggcggggagggaggggggcctgagcgtggtggggggtggaggaggaggctgggctcggtgtcactgcctaagccttccccccggaaacctggcctttcctcggagcctgaaagaggaaagactggctgggaagccggaagcgggaggacgggggacctggagaggggagggaaggcagcttgcactacagggtcctgtgaggggagggggctgggggcctgtcccccgggctcccagagggcggagggtgctgagggcctggaacactgggtccagctactcccggctccccaacatgcacacacacatattcattcattccttcaacaaatacacatttatcaggtcctgtctgtgccaggcactgtgtcaggccaggggagtggccgggggaggaagatgaatgaatcagtgacagaggcttcaggaagtactggcactctggatcagaacctggctccagccttcccttggctgtctgggtgaaggattctcccacttcgagcctcggtttccccctttgtgaaagcccctgcatatactcattcaaccctaagcgaccaatatttactgaatatctactacgggccagcctgcatatatttgtctacatatacgcatattcactgggaccttagcagccaatgtttactgagcacctactatgggctggtgctgtccttggtgctggagtcacagtggcaaaaaccggagctcactgtctgatggggaaggcagatagatacggatcaatcacgctggagtgcatgtgggggaacgtgtgctccgaggcagggaactgctatgggaatgcagagaacagaaggcactgagctgagctcacactgggaggaggtgattcctgaggtcttcctggaggcagcaatgtttcagctgaaattggcagaatgaaaccaacctggcgacatctcagaaacctattctggagcagaaaaggcattttgcaggagtatacccacagcttgacgctgtttgtttaaggttacattcctgccaaacagtgctaatgagagtgcgagcaaacaggtcctttcatacacggctggggcaagtagaacctggaacattcttaccgagccagcaattccaggaatttattcttcagaggcatctactcggaactgcacaaaataatgtctgcaccaggttaatcattgcagtactgcacatcactgcaaacagctgaaaccaatctaaacacccatctgtaggagagctgagtaataaatcatgactgatccacccagtggaatactaggtgtccatagaaaagaacaaagaagctcaccgtgtgcatatatggtaagtctccaagtgataacctgtagaagagaaaaatggaaggtcaagtacagcctgcagcctgttctgggtttgtgtgtgttctgggattgtgtccagatgaactggaacaagagagaagaaactgaaactggcaacatagtctaacttccaggacagaaatttactacactctatccttgtttttttgtttgtttgtttttttttgttttgttttgttttcttttgagatgagatctccttctgttgcccaggctggctggaggaagtgcagtggtgtgatctcggctcactgcagcctcgacctcccgggctcaagcaatcctcccacctcagcctcctgagtaggtggggctacaggagtgtgccaccatgtctggctaatttttgtatgttttgtagagatggggtctccctatgttgcccaggctgggcttgaactcctgggctcaagcaatccacctgcctcggcctcccaaagtgctggaattacagacattagccactgtgcccggctttttgtactttttgaattcaaaaccgtgtgaatgtgctatatactcaaaaaagtaaaggaggccaagcatggtggctcacgcctgtaatctcagcactttgggaggcccaggtgggcagatcacctgaggccaggagttcaagaccagcctggcccacatggtgaaaccccatctctacaaaaggtacaaaaattagccaggcataatggcacatgcctataatcccagctactcaggaggctgaggcaggagaatggcttgaacctgggaggcagaggttgcagtgcgctgagatcgtgccattgcactccagcctgggcaacagagcaaaactccacctcaaaaaaaaaaaaaaaaaaaaaaagaaaagaaaaaagtaaaggaaaaagaaatacatggggattataaaaataaatgaaatgaaaaataatagcttactcttgtgagcgtattacaaatatgatcccatttactccttgctttatgaagtaggtaccattatttttcccttttacagaggatgaaagtgagatactagaagtttccaaacctagcgagtctcagtaagaagtttcacttcacaaacagataggagaaatgatagtggat[132 bp omitted]tgaaaccgtctctactaaaaatacaaaaattagctgggcatggtggtgcgcgcctgcaatcccagctagtccggaggctgaggcaggagaatcgcttgatcctgggaggcggaagttgcagtgagccgagatcgtgccactgtactccagcctgcgacagggcaagactccgtctcaaataaataaataaataaataaataaataaataaataaataaataaaataggaatggggtctcactctgttgcccaagctagtcttgaattcctgagctcaagcaatccttccacctcagcctccgaaagtgctgggattacaggcattaactaccgtgcccagactaggagcatgctttttaaaagcaccttgtccataatactatattttaaagaatatataccatggaataaaagtctaaaaatgtctgtggtaataataggcaccaaattcaagatataagttatgtttgagataggagaggcaatcagatcttggagggggtggtccgcggggagtcatttgtatccctaatatttcaaagctggtagtcagaatatgggtgtgtgtattttaacatgttttttgtaaaatacacttaaactttataattgtaaccattttaaatcacacagctcaatggcactaagtaaatgttgcacaactatccacgctgtctagttccagaactctttttttttttttttttttgagacagagttacactcttgttgcctaagctggagtgcaatggcgtgatctcggctcaccgcaatctccgcctcctgggttcaagcgattctcctgcctcagtctcccaaatagttgggattacaggcatgtgccaccatgcccagcttattttgtatttttagtagagacagggtttctccat[133 bp omitted]gttccctagcctcatctgaactcctggtctcaagccatcctcccacctgagcctcctaaagtgctaggattacaggcgtatgccaccatgtccagcctagttccagaaccttttcatcagcccaaacaaaccctaagcccattagcagtcattcccacactcccttctatccccagcccctgtcaactaataatcagttttctgtctctatgaatttgcctattctggacatttcatatcaatggaataatcataccatatgtgttcctttgtgactagcttctttcactttgcataaaagtttctcctcctcctccacaaaggacattgcccccctctttttaaaaagtgagacagggtctttctctgtcgcccaggcaggagtgcattggtgcaatcacggctcactgcaacctccaccaccagggctcaagcgattctcccacctcagcctcccagatagctgagactacgggcatgcaccaccacgcctggctgatttttgtttttggtagagatgggatctcgccatgttgcccagtgtggtcttgaactcctgggctcagatgaccagcccacctcggcctcctgaagcactgggattacaggcgtgagccacctcacctggccagcataatgtttctaagcttcatgcgtgccatggcatgagttggttcttcactcctttttgtggctgaatagtattcctctgcgtgagtgcagtcatccctcggtgtccgcaggggattggttccaggactctcctcagattccaaatccctgggtgatcgagtcccttacagcctcctatctgagggtgcagaacccacggatgtggagggccgctgtcacctacattttgtttatccattcatttgttgatggatatttgggttgcatctatctttgggctattgtgaatagtgctgttataaacattggtgtgtaagtttttgtttgaacagctgtttttaattcttttgggtatataccaaggatgtgtgtactattttatcatctatattttgaaggcttgaaagatggatgaggaggagaaataataatgaattcaggaatggaggtgatagaaaagaaaactttaagcagagagcacagcacatggaagggggtttgcgctctgcttccccagcacatggcgggggatggggttgggggtcttgcattagggcataaaggaggccagtgtggcggagagaggccagagctgcacccagcgaccgtgccgggcctccgagtccaggctgagcttggactcattccgagtgcactgagaagccattgaaaaggttttaagcaggagagtcacatgatccgattagtgttttagagaaattcctgtgggacccgcgtggaggccgggccggatgctggggagaccgaggcggggagccgggaggaggggggcgggggcccaggtgctagagggggggcctgggcccctcgacctccggctgggaaggcggctccctgggcagggggcggggcttgtcgctgactggctcagggctggactccccgatgccagtcccaccgtctccccctcctcattggctctcctgcttccagcccccccctctcccgtgcagcctccagcacccagaaatcatatcacctcactcctgagcccaacaccctcccgtccatggctccccatctccctcggaataacacccagagcttccctaatgacccccacgtgcacccccgtcctcaaggccctgcttgcctggaccccggtgcctccctcccttcctacctccctctccgcgttacatcgccctctccgctctgtcccgagttagggcctttgcacttgcggttgccccggcctggaaagccctcccgaggtttgcatccagcttcgcttacgtccctcactcctacagcttcctggagacacctgtcttgtccacccaggctaaaatagcctctcgtcaccctctggccttcaccttgccttaattttcttttttcttttctttttttcttttttctttctttttttttttcagtcagggtctcgctctgtcgcccaggctggcgtgcagtgatgcaatcccagctcactgcaacctccgcctcttgggttcaagcgattctcctgcctcagc[131 bp omitted]gtctcggcctccctaagtgctgggattacagacgtgagccacggcgccggcctttaattttcaacatggtacttatcacgaacacacactaggcaatgtgtgaatgtcccatggattccctatctcccctgccactagaataaaaactccacaagggaaggggcttgttttgcctgtttaacggctctgcccacaggtggctgcccgggacagacaaggggcttaacaagcatttgtggatgaataaaaagggatgaagggtgggaggagtgaggctgttcctgaaaggaagaaggctcgggggcccgggggagactcccgctcaggcaagcgtgcaggacgctggctggctccaaggtctgcacgcaggaatcagctcgccaaacacaggcgtgtgagtcgccggcgtctggctagtaattaatgttttgcaacggttgagatcgtcctcagggtaaaattcccgctcctgtcctctcctcgcttcccaccccccctccaacctcaatcagcgtatctataaaatggggccgctatgtgacgcgttgggtgcagtgtccagtccagcaccgggcgcttgtgagacacggaggaaatgggatgggtccttctcgttaccgccccagaagagaaaggactgtggtgcaggtgaggtgggtgggaacctcagcctcgcgaggtccctattcattactccctggccggcggccatctccatggcaacgctggcgcctttccagtgcgcagctccggggctcagcctgtctctaagccggtctcggagtgggcgggtcttgtccctgggggcggtgcctgcttcgaagtgggcgggccttgtttctcgaaagaagatactttttttctcaaaccagaaagcatgtctggtttttgagtggcggttgcagagtggagaggaatatctctaagatttagctgattttattcccaaaggttgagctttttcaaacaggcaacagtggatctccattcaaaaagtctcccttgagtgctaaactcttacttgttttctcctcccagaatatgtcttcctcctttaaattttcctttctttttctttcttttttaatttatattttaaattttaattaattaatttattttttcagacggacgtctcgctctgtcacccgggctggagtgcagtggcatgttcttgggtcactgcaacctctgccttctaggttcaagcgattctcccgcctcagtctctcgagtagctgggattacaggcgtgcaccaccatgcccagctaattttcgtatttttagtagagacggcatttcaccatattgcccagggtggtcctgaactcaagtgatccgcctgcctcagcctccaaaagtgctgggattacaggcgtgagccaacacgttcggaattattttttatttttgagacggggtcgcactctgtcgcccaggctggagtgcagtggtgcgatcatagctcactgcaacctcgacctcctgagctcaagtgatcctctcagctcagcctcccaagtaactgggactacaggcgtgcaccaccatgccggttttttgtttgtttgtttgttttgtttttggtagagacaggatctcactatgttgcctaggctggtctcgaactcctgagctcaagccatcctcctgcctcagcctctgaaattgctgggattacagacatgagtcaactcgcccagcctaaaatatcttctttgtgaaatataagacacacagagaaaaaatgcacaatacaaacacacaattgaataaataattataaaatgatcgtccgattaagaactagaactttgtcggctatcagcaaccgtggaaacttccaggatatcccctcccgcttaacttgtccagtccactattctgagttttataggacattgttgtccttgcttttttatatggtttactactgacaatgtatccttaacaatattacagtttagttttatgtgcattataatgggtttgctttttttttttttttttttttggagacagggtctccctctgttggccaggctggaatgcagtggaatgatcttagctcactgcaacctccgtccccctaccccaggctccagcgatcctcctgtctcagccccccgagtagctgggcctacaggcacacgccaccacacctggctattttttgtatttttactcgagacggggtcttgccatgttgcccaggctgatctcgaactcctggactcaagcaatcctcctgccttggccttccaaagtgctgggactataggcgtgagccactgcacctggcctcaatgttatgtaaatgaaatcatgctctgtttctggctttttgggtcctgtatctttgtaactttcattcatgatactgtgtttatctgcagctcattcattcttgttgccgtatagtattccactgcataatatgccatcgctaattatccactgtattgctgatgggcgttttggttgtcctgagtttggggttgaaagtattgctgctatgaatgtttttgtatgtctctgggtgcagggggacttgagttagcatttacgcctagcagtagaattcctgcatcacaggatatatgtatgttcaatatttgagaatggca[135 bp omitted]tgaaagcccgtctctactaaaaatacaaaaattagctaggtgtagtggtgcacatctgtaatcccagctacttgggaggctaaggcatgagaatcacttgaacccaggaggtggagtttgctgtgagccgagatcacactattgcactccagtctgggcaacagagtgagcccctatctcaaaaacaaacaaaaaaatcttaaggaactaaaggggaggaaactttgattctcctaaactcctacttaaatgtgtcctccctcagttttctggtcttagtaagaaatgccaccactcaaccatttattcctgatttctcccttcccattacactcacccccaaccaatacacacatgcacacaaccagtcctctgcattcgtactccagagttcatctccaacccacccatttctttgttttgttttattttattatgtttagtacagacagggtcccactatgttgcctaggctggtctcaaactcctgagctcaagtgattctcccgcctcgacctcccaaagtgctggggttacaggcgtgatttctgttggtcactctggtttaggctcccacaagtttctcctggactgcaggagcgctgcactctcctgactctgcgtcctgcagcttcgtttacactcagcagccacagggatcttggtaagatgcaagggtggtcccttccctcctcgattaacactttgcttcccatcacccagagaacacagtcaaacacctgttttggcttgcctggcttactgtgatgtgacgtctacccacctgttaacctcatctcatccttccctccctgagctcactttcctcctgtgtccatttgggcatcctcctggcaggtccttgctcacccttacccttcagggctcagatcaaacgccacctccgccgagaagcccacatggaccaccccatctaaggtggcataaaaagtgagtaaggtggccattcattttcttaccacccttccctattgccttcagaatgctcaggacgatctgaaattattttctacatttacttgattcctcttttctccatacccgtcgcctacacgacagaacataaaccccaggagggccgggatgatccccacagggagttccaacgcctggctcagaataagccttcagtacgggaacacaatgcagtgtgcaggagacagtctgaaggcacccccacccccaattctctgatgagcgggtcctattctgggggtctggtatagggtccaaggcagcatctaagaggcggggcctctgctcagacacgcctctaatgaggcagtttggtttccaaggggtgtgtcctataagattggtgacttctaaagggcgtgtctagtttctagggggcgtgtccgtctgttggaggtggatcatgtatttaagggacggaactcattttgattgatactgactctaattgtatttatttatgaaacagagtctcgctctgttgctcaggctggagtgcagtggtgcaatatcggctcactgcaacctccacctcccaggttcaagagatcctcctgcctcagcctcccgagtagctgggattacaggcatgtgccatcacacccggctaatttttgtatttttagtagaaacagggtttccccatgttggccaggcacggtcttgaactcctgacctcaggttatctgcctcggcctccccaagtgctgggattacaagcgtgagccaccaagcccagcctaaaccgactctaatttaaaagggcatgtactattcaaagctttgaaacttctcaggagaaaacgaggacccgtctctatttagggagtctgtcctaagagattccccatcccccccgcctggagccaaggatcagaaaatgaggcatcagcgactgacaggacaaggtttattgggggtcctggaaacactggggagagggacgagggggcaaggtcgaggctcacaggggcaccccctagccaaatgcccccttcccctagggattgggaggaagacagagacagacaaaccaacagagatggagagaaagaccaacggatgctacggagagagggaaggaaaccccagtgtccaccacctcccactcagatgagttcacaggataaagaattgcgtggaccggtccacacgctacaggaaaagagaggagtgtccgccctattcactctaaggaaggtggcaggccacagcctagaccagcccattccatgtgatgggggtgtgtgcacatagatcagtccattctactgggcaaggggatttcaggccagtctattctagtgtttggggcggggaagatcgttagggtcgatccattccacagtcggggaggggggattcgagggcagggggcatctaccctggtccctctttcagcacagggaatgaaaaaggggaaaggcagatttcggctatatccattttctggggtcaccagtgactctggtgggtggcatttggagggatctaggaaaattcagggacatgctccctccacattctccagatcaaggtcgttaggaatgatggctctcagggaatggggcagtcttcccttggtgggggtgggtgcccatcttttagtattagggctctcaagatgagaggtacttgtggagacccattgctcactgcaaagtccccatgtcttggggacttacggctacccacactcattccagggacctcaggctcaggagtctctccctagatttgggctcccctgccccagctaaggaccctgtttgtttgtggtcccccagctccggggcctttgtgggtttttggtggcccccacctctccagtcagggtcccctcatttcagggcctgcgtctggatttggatttggagggccggggcctcacgcgcagtcccgaggtcccctggtccaggccgagtccaggaggctgggtggagggcagggcgcacgcagcctggcagtcagtccatgccccggtgcagcttcaggtgcctggagaggttgctgagcgtgatgaagcccttgccgcagatgtggcaagggaagggccgctcggtgccgtgcagcagccggtggcgcttgaggtagcactcgtggcggaagaacttgccgcactccaggcacgggaacggcttctcgccagtgtgcaccagcacgtgccgctccaggtctcgcggtgagcggaacagcttctcgcactcggagcagccgaagatcttcttgccgcggccggagccagacgggggttccccggacgccggttccctttcccgggcggcggtcgccgcctcctccccgccgccctcaccgtggctgacccgccggtgctcctccaaggcggccagcgccgcgtacagagccccgcagtggccgcagccgtaggtggccgggcccgagtgggcctccaggtgactggccagggccgcggccgacgcaaagaaggtcccgcagtcgcactggtacagggtgtcttccgagggctcggcggccgccgcaggtgcaggcgcctccccaccgccctcggggagcagccccccgagcttgggcacgccgccccccgcggggcccaggagcagcctgcggtccgaagccagaggagcgtcgcccgcctccgcagcggtgccttcgcccgccgtctcgggccctgcgcctggccccgcggcccaggcctgcgctgggggcgcgcccgggccctgcaggtcgtgcgtcagcttgtgccgctccagcagcgcgggcgcgttgaagtcgcgctcgcagcgcgggcacttgaagggcttcacgtcggtgtgcgccgcccagtgggccgccagctcgcggccgtggtcgaagcgccgcgcgcaggcgccgcacgcaaatgggggcaaggaggccgcggccgcagctgccgcctctgccagcccccagctgcccagacccgcgcctgccccctcggggccctctccgccgccggcccctgagcccccgcacaccgagcagggccccacattgcagcagacggagcagggcgcactcaaggcgggcaggccagggccgggctgcaggggagaggggagaaccccacggtgctggcgcttgaggtggcggcccaggctggagcgtgaggagaagcggagctcgcagaccaggcagcagtagggtttctcaccagtgtggacgacctaggggtgcgggaggaagggcacaacgtcagggctgagaacctagcccggacaacggattcctggactcccagagggttgtggcacaagctctctgtcacacctacagggccatgatctagggaaacgctcgtcctatcactctctgtttggggtcacggtagattctttcggtccttaaaaaggccatgtcctggctggccatggtggctcacgcctgtaatcccagcactctgggattgcataagcctaggtgtttgagaccagcccaggcaacacagggaaaccttgtctctacaaataattttaaaaactagctggacacggcacactcctgtggtcccagctacctgggaggctgagccaagaagtttgaggctgcagtaagccgtgaccatgccaccacattacagcctgcatgacagggtgagactgtgtctcaaaaaaaacaaaaaaacacgactgggtgcggtggctcacgtgtgtaatcccagcactttgggaggctgaagtgggtggatcatttgaggtcaagagttcgagaccaacctgatcaacatggtgaaaccctgcctttactaaaaatacaaaaattacccgggcctggtggcgggtagtcccagggacctgtagtcccagccactcaggaggctgaggtagaagaatcacttgaacccggga[233 bp omitted]gtggcgggcgcctgtagtcccagctactcaggaggctgaggcgggagaatggcatgaac[149 bp omitted]tgacacagcagccagccctagcagggtgtgtcttctcccttgtcaagccctgctatcccgagccagttatcatgagctgaatacaggccttaggtgtgttagggcagagaagtgattttgaaccgaatccggctactgctcagagtttctcccactgaacgcttttcacacatacagatccagggaatcacttccaagtctagggaatcgaatctcccaggagggagtccaggaatctgtatttttttctgaggcattgccaggcttgtagactgtgtaaaaccgtgccttagagaggttttttgtattgatatttgtccttgttgatttaagattttggaataacagagagagatttgtgagtatggtaatgtcttcctggaggcctgtgaggagaagggtgaggctggatgagaaagagtgcagtgcttgattagtaatgtctgccaggggcacagatctgaagaaggaacagggagtgatgttcatttgcctttctggctccagactcgatgcacctgctgtacagtgtgggtgtagggatctctatcctctttgtcactaaatttattctctctctactcttttaacacaacaagattatgctggtcccagggcccttgtacatgctgttctcactgcctggaatgcccgtaggtctatttatctgtcagctccttggaaacccttcccggaatctggccccctggctcatcagtgatcctcttccaccctccttctttaaagcctatggctcatagcacacttagtgtctacatataacttgagtgttgtctgtctccccaccagctaaggacgataaaaatagtgaccacattggttttgctcacagctgtatttccagggtccggcactctccagacttctcctgagccacactttctgcttctccatgctccagtcacattggccttcctccagttcctccaaagcctgctttgcttccttgaaagtacacattttgttccctggatccggaaagcctcggaccccagaggcagatcattcctcacctttttctcgggaaaaccatccctgaccccatccccgatccagactgcttcagctctctcttgcattagcctcagaatatggttatcctccatcctcagatgtctcggctgcagcctaacattgattaacctagttgttcagttcacatctcccacatttgactcgaggccatacaaagggtggactgtatctgttttgttcccttagctattttttttcccccagagagcctagcactgtatctaaatacagtaggtgctcctgaaatggttcagttgaatcacaacctactggtgggtgggggtgaggcccctcaggggactgtcaattgttgcatcaagctaaggagctcccctttcatcctaaggatcaagggatttaagcaggggtcacctggtcactctgtgatagatgcagagactggatgtgagggagagagacaggaaggagggagaccactgagaaagccggggccaacattcaggatgtgaagtcctgaaccaaggcagatgcatggggacagagaggacagccaagtgtgaaagaccatcggtagatgcctggttttcttcaccctggttgtgcaagtgtctggcacatagacagagtgtgacctagcccgtcccatctttcaccttacctccttccaccccaaccccacagtctcccatcgcttcctggaacacagcacactccttccttcctcagggcctttgcacttgctgttcctgctgcctggaatgctcttcccagggaggattcctcacactgcaggttggctcaggtatcacctgccctaaccttccccacctgtctgaagtagcccatagctctcctctctttactctcacacattgatttgtattttttgtttgtttgtttgtttggagactgagtctcgctctgtcgcccaggttagagtgcaatggtgcaatctcacctcactgcaacctctgcctcccgggtccaggcgattctcctgcctcagcctcccaagtagctgggattacaggtgcatgccaacacgcctggctaatttttgtatttttagtagagacagagttt[131 bp omitted]cctatctttttccagaacattcttgccagcatacttgctttcttgcttcttgtctacttggctactgaccacctccaaaagaaagtaagttttctgaaggcatggaatttgcttttgccttggcaacacagccgtttggtgcagggaaagctgatagtcaatgaataaaggaattaagtatataactgataatcaatgaataaaggaattaagtatacacctgataaacctaagtcttaaaacggtaaggaaggaaaggataaacactagattgcagatgctggtgcgtgcacgcggggtattggcagggagatggggcgggcaggagcctatagatggggaaatttactatgaatgttccagttcgtgggttgctggtgactgaatgagaaatagcgcatgctttcaagggtcagggtgctttggtagggagggagggacattttctaatgggaggaggcgggcgcctaggccttgggccagcttccttttgcccagagtacagtggggcgcgggatcccaccgtagtcctgaccagggaggccagcctagggccggcctgtgggactcacctggtggtgcagcaggccggtggagtcgcggaaccccttggggcaggcagagcagcggtagggccgctccccggtgtgcgagcgcaggtggttggctaggttgaagctgtgcttgaaacccttgccgcagcgcggacatgcgtggggcttgagcgctgtgtgccgggcaaagtggcgccgcaggtctgagcggtagcggaagctcttgccacattcactgcagtgaaacgggaccctgggggcggcagcggcgggcggtgctggtgcaggggttggggcggggacgtcatccatggtggcggggaatacagtggtatgtgggggctctctctggagtagtggggagacagaggagcaggtgagggggtcggctccccatcagctctctcctcccaggttcccagacccaccacctgtcccctgggagaccctcccactgcccacctctctaagccactctcattgttctttaaaatcctcctactctcttagaaacccttctctcgcggctccacgcctgtggcaaaatcttcctaatcacttcatagtctcctcactccacggagtgtttttaagcctctcctcgctcttcgccaatgcgcggccactgctctctgtgcccctcccactgtaatttaagcctctcccactcttccttaagtcccacctactcccttcaaagtcccccacaatgttccctaaggatcttgtattctttgccaagcccttttccttccaaaaggccctcccactcccctctaagctcctcccactcctcttccaggatgaccacttagcgaatgggagggcaaagatttggggctaagcacactggagtcatccttgcagggagaccagaattactcctgtaacatcagataataaaaattcttcatctgtaaaatgggaatagtagtacctacctcatggagtggtggcgagaattaagtaaaattgtggcaataaatgctacgtgcccacttaagctggtgcacagcaaagacgcaacaagtaagctgtttggatgactattatcccgtaagttcctcctggattcctccttaagtcctaccatgattgctaagttatttgacttatctaagcccctctcgggtccactaagacccacttccaaaactccacccaatttttcctttaaagaagccacatcctttctaagactctccactggactcccgtcaccttctcaggccttctctacgaagtctattcccatcccctgcaagtcctttccacattcattataaagacctgatagttgcattaaacccctccaaattacacccttaaactccacccccctcactaggcctacctacttctctaagccacaccccagacaaactccatcccttctactctaaactcctccctcctgcttcctgggctccctttacccaaccagcctcaatgagtttccttccacccctcaatccagggcctacccaccattccttctgagccacgcccctttatcaaaccccacctctttgcctaagaccctcccattttctatccagactctccctcctccacgcccctcccacttccactctaagctccgcccaactcaggctcctcccagcccttgctccgccccagcagccactaggccccgcctcctcctccaccccgcagcctgaggagcgggcccccccacttgcccagtctgctccaggccccaggccccgagagccggccttttgtgcccctccccctgcccctaaaaggtgcagccctgggcgcccggttggggggcaggtcgggcaggccccggggccaggcgagtccacctcgctcgtacggagcgttggtcctggagacccggggcggccccgggaggccggggaagtccgtcggctttcctctttaattacttacacctccctctgggcgccgacattttgggcagcgggggcagcgtcacttccacccggggggcccctcgacttccgcctcagctcccttcccccgccgtactccccctttctcccgccctcttggctccccttcctcatccccgcccttctccctctttccctttcctttcccagccctggaggttgaagaagccaggcccgcgccatcttgggtgagggcagcgggaaggggcggggcttagggacacccacggcgccatacagactaagggcaaggagctgagagcgagggggcttctccgtggcgacactaggcgatgctaacgtaaatgagagcagatactatttctttttcacagcctcggactcctccgattaggatgtacagttggactagggaaaaaaaaagaaagcgaagtgcgccaactgcaatacagagctggaaaagaccggcaccatcttatccacttagcactccatgggcttcgaagcctgtccggtgccatgttaattacgggcactgggcagccattttcccgctcctcatcattcggtatctgtctttgggtcacccgactgtgggctttgtgagaggaaaggcgtttcgaggtggttggggatgtggtgctgggttatttcccactggggacacaccagggccgccggtgcgcaggcgcggcttccgggcgtggccgcgaccggtcgttaggacccagcgagtcccctttgtttcccgcgggcgcgcaggcgggcgggaagggcaggaagggaggggcccggcgcttctccgaggggcggggccggcaccgcgcgccgccgcccccgcctcgccgccgccgaggggcagggccccctcaccccctccccttcccacgcgccggccccgttgcccccgcgcgcgcgcacactcgcgagccccggcgacatgcaaatgaggtacccgagaggcggggggcgcaggcgggagggggggtgtgggggtaggggaggccgggccgcgcgctcccggagcgcgcctccaacacctgttcctgctcccgcgctcgcgccccgcgaagccgtccgggcgcgcgcgcgcagacccccttcctggcagcccccgccgcccgcttacccggcgccgctcattggccgtcgcccccgcagggcccgccccgcgcttgggcttcgcagctcgggggccgatgggcgcgtcagtaccggggcgaggggacggggagggtcgggggaccagtctccccctttccaccgttccaaagaccagactcctagactaggctaccccgtgggagcgaaccgtatggaaaggtggttgctcctctctggacagcagtctatgtggctgttaaaggggaggggggggtgcaggggggcacctgcagcacctgcttccagctgcacctgtgcctccccttcccctccgttacaccccaatcccatgctcccagtatctgagtgggcgccgggaagatggtggtggcgttggtgaagtttattgagtgcttactgtgcaccaggcagtgttcgaggggcattttaaagcccactgtcttattcgattctcctgacaaccctggtttattcacttttcagaggaggaaactggcaaagtcaattgctagttataggcagagctgaattcaaacccaggactgagccctcgtaatgtcccctttcctccttgggtttatttgttctccattctctgggacattcgggtcacaagacctgtttccagttttggccctgccatttactggcagaggaacttaggcaactgacttggctttcctgtgcctcagtttccccatctgcaaaatgggacagatatgccctattcagagggttgatgtgaggcttagctgctcctgataacaatggctaatgtgtcctgaaagcttctgtgtatgaacactttgtgggtattatgctcatggcatgtctgggcaagtacgtagaactatgtgtcccattttgcaaaagtcttgattaaggcttagagaagcgaacaccttgcccaaggccacgcagagagtaaagatttgaacgaatgatgtcttgactccagggcccaggctcttaacatcgcagatatgtttcctcatccaggaatcagggtcaaatatcacctgggaccagtcccttttttccactctggaaccccttccccacttctgccagtcagcagggagggatgagagcattcgtgaggcctctatggctctggagtttgatgggctctccgtttcaaggatcacaatactggtctgcactctcagttggactctatcctctctggaaggtttttttttgtggggaggtggggaggggtgttgctcatgttgatcttgaacttctagatccagaaggagagttagggaggcatagggatgtctggtggagctcagggaagtgcctgtttatcagctgatacaagatcatctcactgttttacccaccagcatagctaaaattgtgtatctggatgaatgtcaaacacacctttgtcaagagacttggagagagggatgggcgaggtgttgggggacacaggggtgctctagaccctgtgagcactgactctgcccctctctcctcttagctggctccagtgcccagacccaagccccccactgctcaatggacacccccagcccagacccgttgccttcgcctttgcccggggaggaagagaaacctctggccttatctcctcctgttccccggggccgccgaggccgtcgtcctgggggagccacctcctcaaatcggacactcaaggcctccctccctcgcaagcggggccgcccccccaagtcagggcaggagcccccactggtgcaggtgcagggggtgacagccccagtaggcagcagtggcgggagcgacctcctcctgatcgatgatcagggtgtgccctatacggtctctgaaggttcagcggctgggcctgagggctctggccccaggaaggccccacacttctgcccggtgtgcctgcgggccttcccctacctctccgacctggagcgccacagcatctcgcactcagagctgaagccgcaccagtgcaaggtttgcggcaagaccttcaagcgctccagccacctgcggcggcactgcaacatccatgccggcctgcggcccttccgctgcccgctgtgcccccgccgcttccgcgaggcgggcgagctggcgcaccaccaccgcgtgcactcgggggagcgcccgtaccagtgccccatctgccggctgcgctttacagaggccaacacgctccggcgccatgcgaagcgcaagcacccggaggccatgggggtacccctgtgtgcaccagatccagggtctgaaccgccgtgggacgaggagggcatcccggccacagcaggggccgaggaggaggaggagacagaggggaaaggggagccggcctgacccacacccccggccatcgctccctgggccaggtttagagcagggagtttggctggtgctgggcctgagccagggggccgggacacccttgtttccggtggtcttcccgttgtgggagcaggtggagggtggagacctaaactttggggtccagctgccttcagcccccctcccccagactaacagacccttggaggcaggggctgtggaaataaatctctgcctgctggctgcctgtgtgtgttccgtgccgggatgccatcctctcctgccttcaaatgttcttcctcggctacaccgtcctgtcgggagtgcggggaattggagaggaccccacttcctgtgcctcatgagcgtggtgctcgccaaagaatggttttggggggaaccttggccccttccccatctccatcagaccccaaagtccatgggtccctcggagtccgcggggaattggttccacgaacctcgcagataccaagatctgggcatacacaagtccagcagtgggccctgcggaacccgcggatgtaggaaaatccgcccttcgtatactgtatgttccaccggtgtttgggtgaaaaaacgtccgcctctcaatggacctgcagttcaaacccctgttgttcaagggtcagctgtattcccagtacacatccaatctaactaaaaacattgaaccttccatgcagacctgactgtaggtccgaccgcctctctcctagccaattcccagaaattctgcagccactttgccccacctccttgtcctgaggacctactgtttggaaggaaaaattaagacaaaggtatgagcaggacggtctgggtaaggtttagagataaggggtgtggattggggcggggctaaggagcgaggggtggggctgagattgcggggcagttaggctgggacctggggcgggggcttagaagagggttagagttgggtggggcttaaagaggtttaggggttggtccgcagaaagtgagagcggtttaaagaggatggatagagttgatctaatagagagtaggggcttggagctggggaagaacaggaggaactgcgtgagagtggggcaaggaggacggataattttttttttgagacagggtctcgctctgtcatccaggctggagtgcagtggccctatcaccgctcactgcagcctcgacctgccaggctcaagcgaccctcctgcttcagcctccggagtagctgagactacagacgggcgccagcatatttagctaattttttttttttgagacggagtcttgctgtcgtccaggctggagtgcagtggggcaatctggctcactgcaacctctgcctcccgggttcaagcagttctctccctcagcctcccgagtagctggaattacaggcgcccgccaccacgcctggctaatttttg[167 bp omitted]at[138 bp omitted]attcagctctgaggtgggcgtggttcagggccgagggccgggggccggggcttaaaggagaaactctgagggaacagggtattggaggtgggacttagaaggtgctgatgggggcgcacgactgctatggaggcgatggggagagaaggaagtacttaatctaagggaagttcctgggagagtggaagcttagcaggaggggctgaatgggtctgggtttggctgtttgggatggggctgagttgggagccgggattatagcgattatatgagcgggcagtgtcaagtgtggtaaatccatggctcttgaccagcatgcagcagaatcagagtatttcaaaacacggatccctagacccccaaccccagggcttctattccgcatggtctgagcaggcagccggatgctgctggcctcccaactatccttgacaaccaccgatttaaaagaatgctttagaggtgggaggcactcaaaagtcacgaggtgcaacttaaatgctatggggtgaaggggcggggcttggatggagggggcggggcctagggaggggtgaagttccagagagtgggagcttggagagggggaagaacaggagaaactgcatgagggcgaggggacgaagacagactttgaggcagtagggggcttataatcacgctgtgagatgggcgtggttcagggccagggggcggggcttcagtgtgagacccgagccggaggtgtggcttaaccggacgcccagagcgtgtcgcggggttcccgtagaagaggcgggcattcaaagcgcaggcgcacctggctcagttcgcccaccggaatcggcccgggctttcactgctcgcgtccccgagtcagtgcgcaagcgcatttcccccctcctggtccccgccaccgcctcctctttccgatcctccacgccggcgcctcgggaacgggcgcgacttccgcttccgggcgggcgggcaggcgggcggtgcggggctgccggggaggggggagggggcggcacttccggtcgggccctcgggtctccccggagcggcggcgcctcctccgcctcctcggcctcctcccggcggagaccccggcgccggtgagtgacggggtgcgtggcccgggggcccgggtgcagcgggggcggggggccccgccctggcccgctgtggtccccagaacgtcccccaacccctagcaagtcagtgcagctcccgccgggcccttgccaagggacccccaatcactgctccccggtaggatcactgcagatagctcccccatgaacgcccccagctaggatggctgccaaagcgctttcattcgtggcgatcccctaaacggctgccagggcccccaaatgatacctcctcgtaggatcccctccacatagcgctccccgtcattgcttcctccaggtcagcctccagatgccatcagcattgcccctccccatgtagggcagctgctcgtgaaccctcttattagtatcctctatataattctccccagagtgtttccttagtgccttgcagcagaactgtcccccgttatctctgtccatacagcaacagcccccaatggccctgaccacctccctccccagcagaacgccccttcgtgggtgtgaaaatactttctattctggtcagcaccaagaatgcctttttcccttctgcaggtcctccagtgattccccttaagaatgcccctttcaaagccacccccccatcgcagcggcacagctccctctagagttccttcacactcacatcctctcccgcctcaggtagaaatatccgcctgcttagctccaggctcccatgacatactcccgtacctcctctcaccccaccctcatcgcggtcagcccgtcttcattacttctgccacagaacagtgtcccgcagtgaggcggtgaagccttccttcccagaatgtgcctcatcctcttcctatggcgtgaacaactgttgccctgacctgcagcttctcacccagctctcaggctatcgtcctggactccctagggaagaccctggacttcactagggtgtgacttcttttctcgtaggcattccttctgcgttgaacgcatattcactattctagctgaagggtataatatacagccacgaagggggtcgatacacacagtgttctcactgtgcggggtctcacagtctagttgatcagacacgagtcgacaaagatacacggggttttgtgggttctctgagagcctgatgaactactttagaggtgaaagctgaattacaagtggcagcttagccatgcaaagatctgggtgagcaggcagcaagaacaacaagtgcaaaggccctgaagtggcggtgagcacggtgagtggaggagcagcaggggaggccggtgagggtggagtggaagatttgaaggcaagaacaagaggaaggaagctttggtctcaaaaggctttggaggtgagggcactgggataaattatctagcctttgtcagctctaccgagcccagaatgttcttcattcattcatacgttcattcgtaaacactggttgaacaactgtttaatgagcacctactttacattgggggtacaacagagaacaaaatagacaagaatccctgtcctcatggagtggatatgctagttgagggggcagatgattaaaagacaaaatacaggccaggcgaggtggctcatgcctgtaatcccagcagttgggaaggccaaagtgggaggatcgctggaggccaggagttcaagaccaacctcggcaacatagtgagaccctgtctttacaggaaaaaaaaaaaaaaaaaaaaaaagctgggtgtggttggtgggcacctgtagtccccagctattcaggaggctgaggtgggagggctgcttgagcccaggagttcgaggctgcagtgaaaaaaaataaaaacaaaaaccaagagtatatgtgcgtgttcagaatatcacgggataaagagatagacctggggggctgtggttcaggatggcctcccccaggattttcctatgtcttgtcatcttgtccctcccaaaagccacacaccaaaaagttatacaagagtaaaaattccccttctcctggacaactgtggcccacttgggggctgctcttaacagcgccctaaccccaggagcgaagtgattgggaggatgagccctggattccactagggttcacagctttgagcaaatcactccctcctttcctagcctcattcattcacttcttcaaacaaaaatgtatcaagccaggaactgttgtaggtcctggggatggaacagtgagcaagagataaaaatccttgccttcaggaagccgatcatctggatggggagaccaacaaaatcaaggcaaagaagtagattatgtgaggttataaatgatgctgagcagtaaggagagaaatgaagcagggttagggagatgaggatgtgggcctgggtgacaggtcattggttactgagaggctcattgagaagacagttgaccaaagatggggaggaggtgaaggggtgagcgagatggttgcctgagagtcagaatattacaggcaacagcaacagccagcgcaaaggccctgcagcaggaatagagtgggcacatgggaagagcagccaggagactgtggaggtcattgtaaggactgtggctttttttttttttttttttgaaaaggagtttcgctcttgttgcccaggctggagtgcagtggtgtgatcttagctcgctgcaacctccgcctcccgggttcaagtgattctcctgcctcagcctcccgagtagctgggattacaggcatgtgccaccacgcccagctaattttgtatttttagtagagatggggtttctccatgttggtcaggctggtctcaaactcccgacctcaggtgatccgcctgccttggcctccaaaaatgctgggattacaggcgtgagccaccgtgcccagtcaggactgtggcttttgaatgagatggggttactgtttggtttgggaccgaggatagacatgctttggttatagtcctcctgtcagtaaaatgggaataataataacacatttgttgtgaagtttgaatgaaacaagccacataaggcacctaagtacaatgcttgttagaggtcaacaaatgttggtgacttgttctggtcttgggtcaagccaagagacttgggatttgttggcagggagatgggtggagcaatgcatgtttccagtatgaagtgggattgggggcgggggtcctccttcattttggagggagaaataccgaaagacagcatgtgatgggactctggagccttgctgcctttcttcaaccactggccctgccactagttaacaatgtgactttagaagtttgtttgtttgtttttgagaaacagagtctcactctgtcacccaggctggagtgcagtggcgtgagctcactgcaacctctgtgtcctgggttcaagcaattatcctgcctcagcttccccactagctggaactacaggtgtgcaccaccacacccggctaatttttttatttttagtagagacggggtttcactatatattggccaggctagtctcgaactcctgactatagttgatccacccacctcggcctcccaaagtgctggcattacaggcatgagccaccatgcctggcctgactttggaagtttaatttatctctctggccctcagtctcttcctttgtatttcagagtcaatgcttgtaaccatcttctagggttactgggaggattcgttgagctcacacacatcagagttacaagagtgctgggctggtagaaagcacacatccagtgttatatgcgcacgttactctttattaacaaaccagaatttcatcacaaggcagcgttgttgcagcagaacggcccacagtctggcatcagaaagacctggaatcagttacctgctttcctctttattggccacatgaccttggaggaatgccttccccatgctgctcctcagtttccccacttataagatgggcccagtcatggtacaggactgtgctgcctccaggcaataacaaatatcaaactggtcaaacaataaatgtgaaccgttaatacacttgctgtgggactcctgtcccttggtggtggtggtggaggggtgggtccctccccatcatgcttctctctgcataaaaccctcctatgacatcccctcttaaaaagataccagtttaggcttgagttgtatgaaagagggaatgtttctggtttcctagtggagattatcataagcctgatcaattctgtccaccactgatgtatccccttcagcatctccacaccctgccctcagtgccctcctcataacatcactgtccccagaattgcttctcccaggaattcctgggatcatttagctccatttctgctacatgtccccctccgttcctctgggagtttgatcagcttagtctcatcgctttgttcattccacaaataccaagatagacattcacagctgtgcatttccctctgagcattgctttggctgcacctcctcagctttggtatgttgtgttttcattttcattaattgctaagcagtttttttgctttttgtttgtttgtgtttttgagatggagtcgcgctcttgttgcccaggctggagtgcagtggcacgatctcagctcactgcaacctccacctcccgagttcaagcgattctcctgcctcagcctcccaagtagctgggattacaggcgcccaccaccaagcctggctaatttttgtatttttagtagagacggggtttcgccatgtaggccagactggtgtcgaactcctaacctcaggtgatcctcctgccttggcctcccaaagtgccgggattacaggtgtgggccaccgcacctggccagcattttctaatgtatgatttctttgtggacccattggtaatttaggaaggtggtgtttccttttcacataccagcagatatttgtcaagcacccacactgggccagtgctacgctaagtgctggggtcacaggggcgagcaagacaggccaagtccttgctttcctagagaggggccaaacagtaaacacacagaaaaggaatgacatgagttggtggcaataactataatgaaacacctgcggctggatgagggactggagagtgatggggtggggagtgctgagtagagacccaaggaggctccagagggagtcttgttgaaatctggcgaagaacactgtaggcagaagagaaagtaaccaccaccctctcccaccaggccccttgtatagacacccctcataacccagaagacatccctaaataaagctcttatcctgatagttctcccctcacctttgttcactcggggaacagcccagtgaaacactgctgtgggggcaagggtgggaatggggttcaagcccattgatccagactcctactccgtgaccatggcaactcactttgcctctccatgccttagttttctaatttatccaacggcgggaacagctgcccctatttagagttgtggggagtcagtgaattaatatgtgtaacgtgcttagaaccgtggcgggcctctaggagatgtccagtcagtgacagctacgattaacctgtgctctagtggagacaagctagtcaggggcttctttccccaaacactcttgccctccctccccatagcgccctaaatcaccccctattccctgcatccttatggcctgtgtttgcctccctggccagtcagccccctccagagctgtctccccaacttaggttccacctacagccttccaattaccaccccagccaagcctgtcctctttccggagatcagattaaacggagggggtgtgaagggcatgggatgttgagtcttgtccaaggacaaggacacccggagctggagactaaaaatatctcactccaggatggcgtttggggtgggggtggaagagacactcacccctcacctgtgggaggagagagcagcccgatggatagaggataaagggtccaggccttggtaggaacccccttgacccccatagcgggctgggcttagagcctggcccccatcgggtagggatgatggacaggaagcgggtcagacctcatgggcccttcaccgactcaccctccgcccacttggtggaggtgcttccccaggccagcaagtagaccaagaactcggagatcagttacgggtgctgagggtctggtgtggtgtggggtacacacatggatacctgccatctggaatgaaaagtcgtgtaaaggaggtgccagagaatgatgccgggggtggagggtcaggagaagccccactaagggcaaggacatgggggggtcaggagaagccccactaagggcaaggatggaactcaagctccctgcttctgttgctaggcttagcccaggtgtgtgatgtcatggatggtacaaatagctcagggggttgaatgcattctgctgatgcatgtgtttcattatgttctgttccaaccctgttgaatctccctgcggtataggggttcccccattttaaacatggagaaagtgtggatcccagtggagatgggatttgaacccaggtctgtccaagcccagggtctgtgttttgattgtatcagaccaccttctgactatatgccagcccccttgctggaatttgtttctcccaggcaagcaaattctcctttctactgtctattaatattaaaagagtgcactccccatactgacttttttcagttctctaggcttgtcctgacttccccatttctactactagtagtaacagtgataacagtatcgtatcttcaattttttaattttagtttttagagccaaggtcttgctctgtcacccaggctggagtacagtgatgtgatcacagctcattgtagccttcacctcccgggctcaagcagctctcctgcctcagcctcccaaagtgctgggatgacagctgtcagccactgtgcccagtccataccttctatgtacggagtgcttacagagtgccaggaaccgccccctaagagccttgcacatatgtgtgtgttgaatcctcacagtcctgtgaggtaggcatgtgctttgtggtccccaggtgtagatgaggaaatggaggcacagagaggttcagtcacttgcccgtggccacacagctagaagtggcagggcttacatttgattctggccccagagtcctccctcctaattacgctgatagaaactgtgattccccttatcattatgctcattttaggataaaacctgaagggatgaggacggagggctgtgggtggggtagggtgcaggagtatggagagacagcagagggtctgagagggtttggaaagaaaactgagtccagaggcccccaggatgcttggacaattggagtctgaaaaggagagaaagtagagacggcccaggccagcgcgctggctcacatctgtaatcacccagcactttgggaggtggaggctggaggatggcgtgagtccaggagtttcagaccagcctgggcaacaaagcaaaaccccgtttctacaaataatagagggcctgcaggtggtgtggaggagagggtcccctctacaaagctgtgtcaggaccccagaaaagatggggagagatggaaggaattagagaaggaaaagaggtggggagtgggtgggagttgagaacacagagagggaaggtgaaggtgagtaggagagtcctggggccagggagccaagaggaagggctgccctttggggtggacaggcagagggactggaagcctaaatctggaaggctagggggtgatccgcacaaggatggatgagtgggcgcacagctccattcacctgcggggagacccagcgccgcggccgtgtcctcagccccgtcctcctcttcacagggtctcccgtctcccacccgccggagatggaggcgaacccagcgggcagcggcgccgggggtggcgggagcagcggcatcgggggcgaggacggggtgcacttccagagctaccccttcgacttcctggaattcctcaaccaccagcgcttcgagcccatggaactgtatggggaacacgccaaggcggtggcggccctgccctgcgcccccggccccccgccgcagcccccgccgcagccccctcccccgcagtatgactacccgccccagtccaccttcaagcccaaggcggaggtgccctcctcgtcctcgtcctcgtcctcctcctcctcctcttcgtcctcctcgtcgtcatcttcgtcctcttcctcttcccaagccaagaagcccgatccgcccctgccgcccgccttcggggcgccccctcctcccctctttgacgctgctttccccactccgcagtggggcatcgtggacctctcggggcaccagcacttgtttgggaacctgaagcgaggagggcccgcgtccgggccgggggtgacgcctgggctgggcgctcccgcgggggccccagggccgcttcctgccccctcgcagaccccgccaggaccccccgcggcggcggcctgcgaccccaccaaggacgacaagggctacttccggagactgaagtacctgatggagcggcgcttcccctgcggcgtgtgccagaagtccttcaagcagtcctcgcacctggtccagcacatgctggtgcactcgggggagaggccctacgaatgcggcgtctgcggccgcacctacaaccacgtgtccagcctcatccgccaccgccgctgccacaaggacgtgccaccggccgcggggggcccgccccagcccggcccccacctcccgccgctgggcctcccagcacccgctgccagcgccgccaccgccgccgccccctccacggtgtcctcgggccctccagccacgcccgtggcgcctgccccctccgcagacgggagcgccgcccctgctggtgttggggtgccccctcctgccaccgggggtggcgatggcccgttcgcctgcccactctgctggaaggttttcaagaagcccagtcacctccaccagcaccagatcatccacacgggcgagaagcccttctcctgctccgtgtgcagcaaaagcttcaaccgcagggagagtctgaagcgccacgtgaagacgcactcggccgacctcctgcgcctgccctgcggcatctgcgggaaggccttccgcgacgcctcctacctcctcaagcaccaggcggcccacgcgggggcgggcgccggggggcctcggcccgtgtacccctgcgacctgtgcggcaagtcctactcggctccgcagagcctgctccgccacaaggccgcccacgccccgcccgctgccgctgcggaggcgcccaaggacggggcggcctcggccccgcagcccccgcccaccttccccccgggcccgtacctcctgccccccgaccctcccaccacagacagcgagaaggcggcggcggccgcggcggcggtggtgtacggcgctgtgcccgtcccgctcctgggcgcccacccgctgctgctcggcggcgcggggaccagcggggcgggaggctcgggcgccagcgtcccaggaaagacgttctgctgcggcatctgcgggcgcggcttcgggcgccgcgagaccctgaagcgccatgagcgcatccacacgggcgagaagccccaccagtgccccgtgtgtgggaagcgcttccgcgaatccttccacttgagcaagcatcacgtggtgcacacgcgcgagcggccctacaagtgcgagctctgcggcaaggtcttcggctacccgcagagcctcacccgccaccgccaggtgcaccggctccagctgccctgcgccctggccggggcagccggcctcccctccacccaaggcacaccgggggcctgtgggcccggggcctcgggcacgtctgcagggcccaccgatgggctgagctacgcctgctcggactgcggcgagcacttcccggatctctttcacgtcatgagtcacaaggaggtccacatggcagagaagccatacggctgcgacgcctgcggcaagaccttcggcttcatcgagaacctcatgtggcacaagctggtccaccaggccgcccccgagcgcctgctcccgcccgcacccggcggcctgcagcccccggacggctccagcggcacggatgcggccagcgtgctggacaacgggctggcgggggaggtgggggcggccgtggcggcactggcaggggtgtctgggggtgaggacgcaggcggggcggcggtggcaggtgctggcgggggtgccagttccggccccgagcgcttcagctgtgccacgtgcggccagagtttcaagcacttcctgggcctcgtgactcacaagtacgtgcacctggtgcgacggaccctgggctgcggcctctgcggccagagcttcgcgggcgcctacgacttgctcctacaccgccgcagccatcggcagaagcggggtttccgctgcccggtgtgcgggaagcgcttctgggaggcggccctgctgatgcgccaccagcgctgccacacggaacagcggccgtaccgatgtggcgtgtgcggccgaggcttcctgcgctcctggtacctgcggcagcaccgcgtggtgcacactggcgagcgggccttcaagtgcggcgtgtgcgccaagcgcttcgcgcagtcgtccagcctggcagagcaccggcggctgcacgctgtggcccggccccagcgctgcagcgcctgtggcaagaccttccgctaccgctccaacctgctggagcaccagcggctgcacctgggcgagcgcgcctaccgctgtgagcactgcggcaagggcttcttctacctgagctccgtgctgcgccaccagcgcgcccatgagccgccgcggcccgagctccgctgccccgcctgcctcaaggccttcaaggatcccggctacttccgtaagcacctggctgcccaccagggcggccggcccttccgctgctcctcctgcggcgagggcttcgccaacacctacggcctcaagaaacaccgcctggcgcacaaggccgagaacctcggggggcctggagcaggggcgggcaccttggccgggaaggatgcctgaccgaggggttcccatcccactcccatcaaaagcccccttctggactcccacctcccaggactgatcagactcttcccccctcctcgctgttgccccatccttcagaacttcacacggactggcgaccttcagggcgcacgcccgacaggctcaagactgaatcactcccatcctcgacctctctgccctcccctcatcccatcagacactgaaccctatcctccgtccaaccctcgtttgtgacccgcatcagcccccgccccagcagcactctgcccccagtaagttttggcggagatgggtctgaaccgcccctccccctcctttggaatctggctggacagtggagtatgagcagagttgggagggcacaagggagtgctgggtgctttttggggtgggggggtggggggcggggtggcagacgcggcttgtacagagcggagaataataaatcttaccatgagggccgctggagtccatccttgcatcccacccagggagagtggggatcacatggtggcaaagcacaaagttaaaacttgtttcctctgcagttttgatgccgggcgcctctgtctctcactcactctcattcaacagggacttactgaggatttgctgtattcccagcgttagtctgagctgggcaaatggagatggacaagacaggtaagtgtctgctctcaggaactgacttaacatgccccgactcttccccttccggatgctttcagcctttgttcactccaccaccacttccggagacctcctgcctgccaggccctgagctgggcactggggaaacagatgaattggacgtgccccttggcctcaagtaacacaaaagagaactcccatccggctgccgtggctgcctcacaaccatgtgcagactgatggtcatgatacagctccctcttagcacttgtcctccagggtaatgattgggagattcaaaagcccgttcacagctctcatgttggctctgggaacagcaagatgtatgcctggcaatgtgtgtttagttatctcatttgttagaagaagggcctggggtcctgaagaacaaaggtgctccag[140 bp omitted]accccatctctactaagaatacaaaacttagctggacatggtggtgggcatctgtaatcccagctactcaggaggctgaggcaggagaatcacttgaactcaggaggcagagattgcagtgagctgagatcgcaccactgcatccagcctgggtgacagagtgagactccatctcaacaaataaataatttggacttcagtcccagagtacttcagtacagaaacttgaagatgaggccaggtgcagtggctcatgcctgtaatcccagtactttgggagcccaaggcgagcagatcacctgaggtcaggagttcgagaccagtctggccaacatggtgaaccatcctttctactaaaagtacaaaaattagctgggcgtgatggcaggtgcctgtaatcccagctactcgggaggctgaggcaggagaatcacttgaacccaggaggtggaggttgcagtgagctgagattgcgccactgcactccggcctaggcgacaagagcgagattccatctcaaaaaaaaaaaaaaaaaaaaaaaaggaaaaaaagaaacttgaagatgaaactaggtaagagcgctgcttgggtgagtcctgtgtgacccatgggagagcagctaccctgtgtggctccatgttctaatgctgaagacccagcatgagacagacgttgtgccagtgcccccagggttcagggttcagcagtaacatggaaatggagcctcacagtgtaagggacttggaagtatcactagggcttgagggagcacagaggagtcacctgtcagagtggaaggggggctagaaaagcttcttggggagaaggtgatccctgaacgatgacataaaccaactggagttttccaggtaaagaagtggcaaagaggccgggcacggtggctcatgcctgtaatcctagcactttgggaggccgaggcaggtggatcacgaggtcaggagctccagaccatcctggctaacacggtgaaaccctgtctctactaaaaatacaaaaaatcagccgggtgtggtggtgggagcaggtggcaggcgcctgtagtcccagctacacgggaggctgaggcaggagaatggcatgaacccagaaggcggagcttgcagtgagccgagatcatgccactgcactccatcctgggcgacagagcaaggctctgtctcaaaaaaataaataaataagaaaaaaaaaaaaaaaaagaagtggcaaagatttccaggcggagagtttagtgtgttgaactaaaccctgctattctggagcatttaagacagattagtatggctggaggttgggttcctgggggctaaaccctgaagggtcttgaattccaaactgtggggcttgggtgattttataggctagaggctggaaactggcagctgcaaggccgaatatgaccactaacacatttttgtttagtctgtgcattttttaaaaagtttgacttgactgccaacattgggaaatcaaaagattttacataatgtgaactaatggaacttctgaaagaaactggaagatgtggcaacccaatctgtgttccggagctgagcagccattaccctcttctgaagaggcactctccaatttgttgaataccaattctgagacctggtggcaatcgccattatttcatgttgctgatattttccccttgaacctggccgtcttgctcgtgtatttacattttcacccagctcctgtaggcattcacatttccaaatcgtctcaaagccacaaggagctgtgtcttggtgacaaggatctgcatggatgccatatggagaatgaagagggcaggtggccgggtgcagtggctcacgcctgtaatcccaacactttgggaggccgaggcgagtagatcacctgaggtaaggaatttgagaccagcctggccaacatgatgaaaccccatctctactaaaaatacaaaaatgaactgagcgtgatggcgcccacctgtaatcctagctactcaggaggctgaggcagaagtgcttgaatccaggaggcagaggttgcagtgagcagagattgtgccattggactccagcctgggcaacaagagcaaaactccatctcaaaaaaaaaaaaaaaaaaaaaaaaaaaaaaaaaaaaaaaaaaaaatgcaggcactggactgctgtgcagttgtctgtgtgtgagaccactgttggtctacaagtgtagtgatgccgaaaacacgttccagttccaaagatattaactggctcaactgagggaaactgataagggactggacataagaatgaggatgaagaaggtttaaacctgcccaggtatccagcttgggtggtggtgccaatgacatcagaagcatggaggtttctttgaggaaaatggaatgagttctgttcacattgtgagttgcctgtgagttatctcatggggcccactgggtgaacagaaaggtgtgcaaatcagaggctctcactcaacaagcatgcaaagcatgttgagtgtgcttttgccaaacttccctgacccccctctcctacagctgaaccacataacacgtaaccacagtggggcctactcaccccccattctgatgatggggaaacagaagcttggaggaagagatgatgcaactgactgctggtggcaaaaccatggtgaggcccctcctcccccaactccccaaagcggacaatccgaatacaagaccgacagagaagcccttcagaaggtcctttaataggaacagaactgaaggtgtcacacctccagctcccaagtcctcctctcgcccccaccacagtgactctttcactccacacccaggccagcccaccatgctgccatcagccagcccgcccttgggattggcggggactaggcagtaagctgtttgcttcgaactgggagtggaggaaattagagaaacctgaggctaccttgaggcttgtgggggaccctgggctctgagtctaaagctttaggagggggatgctaggtagctgcttgctttatgtgttctcagttgcctccgaagaagagtggatgggttaaggacggaccacaatgggggtgggggttgccgctgttggagtcaagatcctatggtcaggcttacatccttgaggctcaagtgctctcagcggtgacttggggaccctctggctttgaggtgatgggatcccagagtctcttcacagataacctggtgagtgtcttctgccagagggtggataggcatcccaggtccagtgcaatgcagtgaggtaggcaggagactccatcctggtccacccgtggaggaccagagcagaagactatggtggaccccaattccccccttccattcgatcctggctcctcctctgaagtgcccaggctctgtcgtgacaggctgggtcttgcacaaggacaagccaaccaagagacagtcggggaagtgacatccagcccgtgggccttgcctttggccgcacacccgcagagctgcaagagctgcacctgtcctctcctaggcctggcagaggtgctgtgtgggcgtgtgggagtctggagcctggccctctccctctgctctccatcactagcggctcacaaccatccctgcagctgtcatctctcccccaatctcccctcttctgtcccctgcctccgtttccccaccccgtccccctccccgggtcggcctcgtacctccgccttaactaacccatgtccctggtctgcagcctactggtcggcctccaccttcaccttcgcggtctccccccgcccctcctccgcagggtcccctaccccacacccgctccccgacccctcagccgccgacgagcccagctggcctccagagtctcccagccccggccccggcccgtggaagtgggtgcgctggtgcttgcggaagttggaggagttgttgaaggtgcggtcgcagagcgtgcagcggaacgggcgctcgccagtgtggatgcgggcgtggccgctaagcaccgaggactgggtgaagcccttgccgcagatgccgcaatggtatggccgctcgccagtgtgcacgcgctcgtggtctcgcatgtctgaggagcggcggaagggcttggcgcagaacctgcaggcaaaaggcttccccaccgctgcgcccgccgccgccgccgccatcaccacctccgccctctccggggccaccccgggcctctgttctgcaacggccgctgtgtccggaggcctccgagaggtgcccggctccaccccgtgccggtgctggtgccggagcaggggcgccaaggccttgaaggcgcgggggcagagcgcgcagcggtagggccgctcccccgtgtgcaagctgtagtgcgcgcgcaggctggcggggcccgggcagctgtggccgcacacgtggcaccggctcgggtccccaccctgcccgcctccctcggccccagccaagtggccatgttcgtggaacagcagctcggaaaccagccggaaggcagcagggcacaaggcacagtggaaagaacctggctccgggggctcagggaccagcgtggtgtccgtcaccttcaccacctggatctcgatgaggtcactcgggggtgtgccaggccggcagtcatcaggcaccaggacctgggcaagaggagaagaaagaggagcctgtggaacctgcctcaggaccgccccagcacgccccaattattaaagcttgggctcctctgttattttcagacagggcctcactctgttgccctggcgcgatcgtggctcattgcaaccttgacctcctgggctcaagcgatcctcccacttcatctccctgagtagctgggattacaggcatgcaccaccacatccagctagttaaaaaaaaattatttctggctgggcacggtggctcaggcctgtaataccagcacattgggaggctgaggtaggcagatcacctgaggtcaggagttcgaaaccagcctggccaacatggcaaataccgtttctactaaaaatgcaaaaattagccaggtgttgtggctgctgcctgtaatcccagctactcgggagactaagacacgagaatcgcttgaacccaggaggtggaggttgcagtgagatgtgatcatgccactgccctccagctcaggcgacagaacaagactccatcttagacagcaaaacaaacaaaaattattattattatttttaatgtagagggagtcccactatgttgcccaggctggtctccaactactgggctcaagagatccttctggctctgcctcctaaagtgctgggattgcaggcgtgagccgccgcgcccggcccatcctccaggattctgttgtatcctcatcaacatttcctctcctgtccaaaatatatcatggatcccaccttttgtcctccaccctagttaaagccccatcacttggcgcctccaaaattgaaaaacccaagggcatctctgttcctatttctgctggcttgtaacccacctcccaggaatagcctgaaggtcttttgaaaatgtaaatcagatcaagtcatttttcgcactcaaaaccctccagtggctccaaatgacttatcccaaatcgtcactataatatctgtggcgatgtagctccacttatctctctgaccccagcttaaacataagccggcacccagctgacttctctcgtctaaatttagctgccccacccctactcttggctcaatttatagaaattggctcaatttttatttcctttatagaacatatcacagtaactctcctttattgtctctctcctctcaagagactgcaggctccaaaagaacacaacccttgtctgtcttggtcacttctctatttacagagccgaagtaggagctcagtaaatgtttgttgaatgaatgaatgtcctcaattagtctaattctgagtggggtaacgtggaggaagttccaaagtcacctagaccacccacttctacccccaaattctcccttgggcattcgagaagcatcactaagacccttgaagaattatcccctaccccgacataggtgctccaatcataatcccccacgtttttcagggtcaccttcccaaccttctaccctagaattagccctagaatttatgaggccccgccccttacaaggctccacccaaattatgcaaattatccctggtaagcccccttccctggacccaaacccgtcccacaagacaacaccgtcctcagactccgcccccatccaggccccgcccaccacccataggtccctcccccaccccgcccaccatgacatagtctcctcccctgccccgcccctcgcgaaaccacaagaagccccacccccagggccatagcactaaatacctccctcgcccaccccctcataggccacgccccggacccgccccccacactacgacctcctcccacctcgagccccacgcccaggccccttccttgcccgcaccaggtccagtggctcctgggatcgcgactccggagtcggtgagctccgactctgggcctctgggcgcgcagcggccatcttgtgcccaagccccgcccccaaggccaatgttcgctctgaaagggggtggggctcgaactggcgtaagagctactgcgcaggcgcagtgcggggctgcgagggggcgtggtgcagcagggggcgtggcggggcggggcgtggcggctgagcccgggagaatgtgagttgttccctctctaattacctgtctgtccctccgagggtacgctctgtgtggcgctaggatgcctgtaacaccctgggaacaaatccgaacgttccttctaaaccaacgcaggccgactcgaggctctggctgtcaggggaacctcagcagaactgaagaagctttgctttgtttccacggtaaacgtttttgtgattacctctgcactgctcatgacaacgtaatgacgccaagtttataaacgtcggtgtaggccgggtgcggtggctcatgcctgtattctcagctactcgggaggctgaggtgggaggatcgcttgaggccgggaggtcgaggctgcagtgagccatgatctcgccactgcatgcagcctgagtgacagagactctgtcaaaaaaaaaaaaaaaaaaggcagtgtggagaaaaatattcagtaaacagcaacacaggtggtcctgggaggacgcaaaaacccgcaagctgatgttatgtttgggaggaaagagctcaaaaacgcggggttttcagcagcatcaaggacggggctcttcttagctgccccgtttagtcattctggtggtatcaccttggataagtcactacacttctctggaccatttctctttcttttgtgtagcactgtagaagcattgtgacaaaccactgagaagagacatggaagagtttggaaacatctttaaatagttttcttgaaagggcaggataggagatacttaaacatgatcctaagcatgatcatttcattcataaatatatatgaaattatattttgtgatatgttggtataaaataaagataaacaccacttaggctgaattatctcctcctcctcctttcttcttcttttatagagatggggatcttgctgtcttgccttgcccaggctggtcttgaactcctagccttaagcgatccttctgccttggtcttccaaagctatatttcccttcttttcttttgattttaaaataatttttttttttttgagatggagtctcactctgtcgcccaggctggagtgcagtggcatgatcatggctcactgcaacctctgcctcccgggctcaagcgattctcctgcctcagcctcttgagtagctgggattacaggtgcccgccaccatgcccggctaatttttgtatttttagtatatacagggtctca[131 bp omitted]ctaagagtatcatgggccctaggcactgtatctactactgtgtctaatgcttaagtcagctctttctgtccaggtttcctaatttgcaaaatgagggtgataataaaacctactttacacagttgctatgatgattaaagaagtcattatatataaagtattttggacaatgtatggcacacagcaggtgctatgagttagctataataattactaccatttggcactcccactagcaataaatagggacctttgttgcttaacattcctatcaatatctgatactcaaactttaaaatgttcgctaatctcttgggtgtgaaataatttcatttcttttcttttttttgagaaacagcccaggctggagtgcagtggcgtgatctcagctcactgcaacctccacctccttggttcaaacaaatttcctgcctcagcttcccaagtagctgggactacaggtgtgacacgtcattacgttatcgcaagtggtgcagaggtaaccacaaaaacctttactgtggaaacaaagcaaagcctcttcagttccgctgaggtcttccactgactgctagagcctcgagtcggcctgcgttggtttagaaggaacgttcggatttgttcccagggtgttacagcccagctgatttttgtatttttgttttgttttgttttttgtttttagtagagacagggttt[136 bp omitted]gagatcattcatagcacccagaactcatcctccagtttcccttttttgagagctggaagtatgtcatctctgtatcccctctgtacatccctatagagaaggcatgtatatggctcagtgagtgtttggtgaatgaatgagtgagaaattgaattcatgcagatagaagaactttgtaccagagcttaaggctattgagtattttttcccttttttttcctccccacccccactaaagctattaaatatttgcagaggagagcactgtttagtggaattaccataagctttcaaatcaggcaaacctgggtccagatccgtttatctgcttgctgtgcaactctgggcaagcaatgtctcctctaagtgtctagctgacatctacaaagtgggcaccataatgtcatttggcagggttgtagttagaatgccactgattgagaatgccaaaggtctgtgtgatgcctggaaccaactggtgctcaataaatgtgggttctgcctgggcttggtattctctactaagaatacaaaaattaacatgcacagtggagcacgcctgtagtcccaggaacttggggagctgaggcaggaggattgcttgagcttgggaagttgaggctgcagtgagccaagatcacaccactgcactctggcctgggtgataaagtgagaccctgtctcaacaaataaataaacataaaataaaataaatataaaattttaaaatttaaaaatgaatctgggttccttgccttttcacctgttgtctggcttctgagtccctcggtacctggcataacactaacaggctattgcatgacttgaggctagaagccctgctacacggagccattagacaattgcaagaagattttagccgggcgtggtggtgggcgcctgtaatcccagctactcgggaggatgaggcaggagaattgcttgaactggagaggcggaggttgcggtgagccaagattgcaccactgcactccagcctgggagacagagcaagactccatcttaaaataaaaaaataaaaaaataaaagaaaatgccaggaagagtcttggacttggaatcagatttgcctcgcttctctccatctctatcttcctgtaaaacctgagcacttcacttctcctcacggagcctagatttcctgccttttaaaagaaattggctgatagaattagctagatggctctgcagttcctctccctttcatttttctatgtgcccaagaaaactgaaaatatacattcacacagaaacttgtaaacaaatgctattcataacagccaaaaagcagaaacagcccagatgtccataaacataaacaacatgtggtatatccatagagtggaatattatttggccataaatgaataaaatactgatccacatgacaacatggatgaacctttaaagcattatgctaacttagaggctgggaagggtgtgtggtggaaggagggatgaatgaaggttggttaatgggtaccaacatagttacagagaagacatacttttttttttttttttttgagatggagtttcgctcttgttgcccaggccggagtgcagtggctcgatcgcggttcactgcaacctctgcctcccgggttcaagcgattctcctgcctcagcctcctgagtagctgggattataggtgcccaccaccacgcccagctaatttttgtgtttttagtagagatggggtttcaccatgttggccaggctggtctagaactcctgacctggtgatctacccgccttggcctcccaaagtcctgggattacaggtgtgagccaccacgcccagtccgtgtatttcaaagtagctaggagagagcacttgcaatgttcccaacacatagaaatgataaacactcaagatggtggttaccccaaatgccccgatttgatttgatcattacacattctatgcgtgtaacaaatacatgtaccccaaactctgtaaaatattatgtgtcaataaaataaaatttaaaaatatattaagtgaaagaagccaggcacaaaggaccacatattattaagattctattaacaccagaatagggaaatctatagaggcagagtgtagctttgtggttccttaggttgggtggggatagagagttggggggaaggaagaatagaggagtgatacctaaagggcatgggatctctttttgaggtgatgaaagtgttctaacgttgactatcatgatatgtgcacacaactatgaatatactgactattgaattatacactttaaatgggtgaattgggtggggttcagtggcttccgcctctaattctagcactttaggaggcagaggcaggaggatcccttgagcccagcagttccagaccagcctgggcaacacatcatgacagccatctctaccaaaaaccaaacaaacaaacaaaaacaaaaaacaaaaacaaaaaaagcccggtgtagtggtgcatgcctgtagtcccagctacttagcaggctgaggtgggaggatttcctgagcccaggcggttgaggctgcagtgagccatgaccgtgccattgcaatccagcctgggcaacagagtgagactccgtctcaaaaaaactacaaagaggccaggcgcggtggttcacgcctgtaatcccagcagtttgggaggccaaggcaggaggatcacctgcggtcaggagttggagaccagcctggccaacatggtgaaaccccgtctccactacaaatacaaaaattagctgggcctgtaatcgcagctactccggaggctgaggcaggagaatcgcttgaacccaagagacagaggttgcagtgagccgagatcgtgccagtgcattccagcctgggcacagagcaagaatatgtctcaaaaacacacatacacacacacacacacacacacacacacacacacacacctctaaatggcgaattatatatgtagtgatatgtgaattacacctcaataaagcagtttaaaaaaataatcggctgaacatgatgacctttcaggatcaaactgcagatgatatttaaaaactataaacctggtatggtaggtatatggatgtttactatgcaattttatttttatttttattttttaggcagagtcttgctctgtctcccaggctggagtgcagtggcgcaatctcggctcactgcaagctctgcccccagggttcacaccattcccctgcctcagccacccgagtagctgggactacaggcacccgccaccacgcccggctgatttttcgtatttttagtaaagacggggtttcactgtgt[136 bp omitted]ggctggagtgcagtggcatgatcttggctcactgcagcctctacctcttgggctcaagcgagtttcctgcctcagcctcccaagtagctgggaatacaggcgcctgccaccacgcccggctaatttttgtatttgtagtagagacagagtttcaccatgttggccaggatggtctcgaattcctgacctcaagtgatccgcctgcctcggccccccaaagtgctgggattacaggcatgagctgctgtgcccggcccctttttctt[132 bp omitted]gcctcagcctcccgagttgctggaactacaggcacccgccacctcgcctggctattttttttttttttttttttggtatttttagtagagacagggtttcaccgtgttagccaggatggtctcgatctcctgacgtcgtgatccgcccgcctcggcctcccaaagttctgggattacaggcgtgagccaccacgcccggtctctttttctttctttctttgtttctttctttctttcttttttttttttttttgagatggggtcttgctttgtcatccaggctggagtgcagtggcacaatcatagctcactgcagcctcgacctcctgggctcaagtgatcctcccacctcagcttcctgagtaacttggactacaagtgttcacgccatcatgcccggctgttttgtatttttttgtagagacagggcttcaccatgttgcccaagctggtcttgaactcctgggctcaagcaatcctcccgacttgacctcccaaagtgctgggatgacagacgtgagctaccgtgtctagccgccataatttctttctttttttttttgagacggagtcttgccctgtcacccaggctggagtgcagtggcgcgatcttggctcactgcaacctccacctcctgggttcaagcagttccctgcctc[226 bp omitted]tctgtgaaatgttactgctgaatttgagaaaccaaagggccttcttccaaattctagtcgtgagttacgtaaggttccttagtgaggctgaacgagtctttgaacttgagcttctgcaggctagaggaaacacagtagtccctacctgcttcttccaggttctaaggtgggtgagacattttgatattttggtctttgtcgcccccacgaggcctaggagggttccctgtcgcagcaggtgtccaataaagatcaatccgccaggtgcggtggctcaggcctgtaatcccagcactatgggaggccgaagcgggcggatcacctgaggtcaggagttccagaccagcctgatcaacatggagaaaccccgtctttactaaaaatacaaattagcccggagtggtggcacatgcctgtaatcccagctactcgggaggctgaggcaggagaattgcttgagcgcgggaggcggaggtcgcggtgagcagcgctgagatctcgccattgcactccagcctgggcaacgagaacgaaactccttctcaaaaaaaaaaaaaaaaaaaaaaaaaaaaagtgagaaagatttacttgccacctagggtaactgctggtcttctttcccccgttagtctcgctcaggaggcgggtaatctattttaactctgcacctgctggactttgtgaatgggcagtttactctctggtctcagcagccccatcgataaaatgggaataacttgtctccttgtcaacagccagatggtggtgatttgccaaatctaagacatctattttcttgccttgttcttctttattttttcctctcagttttaaaactggatagtcccaggacttctcccaaaccaggatgagttgctcacctattttgtcctcacttgtatccttaagtccaaactgtcattaccttattgaccaccagggggtgccctacacacgtagtactgtggtttaagaagacagctcaggaggaggcaaagaaagagggcccagttcccagccttgccctgagttcctacaaaccttcacgagcctgctctacttcacacagcatcatgtctcacactcagcatcctcctggccctatgatatgaacatgtgtgtggtccagtggaaaggtcttttaagtactccagcagcctctgccaacactggctaaccagctgggtggacggtcactgcctctctgcccactgttcccaacatttccaggagttggcccagcatatcctggccggctgagaaggctgaggccacctacttgattttatttatttattttttgagacagggtttcactcttgttgcccaggctggagtgcaatggtgccatctcggcttactgcaaccttcgcttcttgggttcaagtacttctcctgccccagcctcctgagtagctgggattacagtcacacgccaccacgcccggctaattgtgtatttttagtagagacggggtttctccatgttggtcaggctggtctcgaactcccgacctcagatgatcctccgcctcagcttcccaaagtgctgggattacaggtgtgagccaccccgtccggcctctttaggttatctttagagctggatatcatttccctccatcacatagccttgcagagggaagtgacatcattgttaaccaaaataagttactgaggcaagagcctcaatcactccagagcttatatatccagagcttgagggcagacctgggaaaggcaagagtcacagaaaacctctgtggcttatggaaaggttttcaggaggcttagtatttatacatttccttaaaggagggaaggcaggtgggaagagggtgacagatggaagaatgattgagctcatcgtttttgttctgtacctgggaagataagcattatcagtgggaaacctaacagactttagttttaggagctagacttagattgcaaacctaaagttacaagggacatgttcttcttcttattattatttttatttgagacagagtcactctgtcatccacactggaatgcagtggcgccatcttggctcactggaacctccagctcccaggttcaagcgattctcctgcctgggcctcccaagtagttaggattacaggtgtgcgccaccacgcctgactaattttttttttgtatttttttttttagtagagatggggtttcactatgttggccaggctggtcttgaacgtctgacctcaggtgatccgcccgcctcgacctcccaaattgttgggattacaggcgtgagccacagcactcggcccatgttcttgttttatgggaggatggaggacagcaaacaacaatgtgtactggtggtcacgtggaggtacttgaggcgctttgtttttctgtgagggtctggctaacgtgtaatgctttgacacaaggttctgaagcaacagctgttgatctgggaagcagatagcagtgttgcataactcagtctccaggcttaaccttccctttggcataatgaatttggcagccctgagacttttaaaataaaagtctttacatcctactagccagctttgactagcagtgtgatccagggccaatgactgcccctctatggccttggcgttaccacctaaccaatagggatacggtactccattttcttgccatggagcaaatcaagagttagggcctgactgtcttcaactgtctcatgagttgaagaatttcagccctctgcctttgctctgtagcaacagacaaatcactagacctttctgatttcaggtcctatttgtagaaagacttt[135 bp omitted]tgaaatccccatctctactaaaagtacaaaaattagccgagggtggtggtgtgtacctgtaatcccagctactcgggaggctgaggcaggagaatagcttgaacccgggaggtggaggttgcagcgagccgagatcacacactgcactccagcctgggcaacagagcgtgactccgtctcaaaaaaaaaaaaaaaaaaaaaaaagaaagaaaagtccttttttttttttttttttgacaaaagccatctctgttgtattccctccctcagcatccggcacggcgccaaatagtgatttcattttaacttttgtgtagtgtgtgtgtggagtagcaaggtgcgcgacgcaggaacctttctcttgtgggtgcgtttctggcccgagtgctttcctgctgctctccgaatccggaagctgctggagaagtcggagcatcccggaagtcgtcactgcggccgcttccggacgtgaaagtttgctgcgtagggatagggagaccgggccggattgcggggagtgagcaggttcagcagtgacggcattcttaagagtcctgcccaagtgagggacttggggtgtgggacagagtggcccccagggcagtgggcgttggaaactgagaggccctgcgaaggaggcttggggaggggctacggtgaccaggggacgaggtataggaagaggagggcggaaagccttgagggtgggcttcttggatcccaattgccccagaggcacaggcctgggcatcactgtattatttcccgaggggagaaggggctatttcccatgggaagacaaagtgggatgaatagtggaccttgagaagagggggtggccaggaaaaggttcctgaaggaggcaggacccagactgcaggctggggagggtttgggcagccagagggaggtgagggtgctggagcgggggtcaatcggtcactccggccggagatctgagtggcctctgccccctctgcgctgtggagtgcatctgattgccagcctcgctggaccgttgagaggattcatcgagaccctggatatgaatatgcagtgtgaactgaagtttggggacatgagtaatcagtcacagtggcccaagatttgaggtgtaaatggagaagtcagaatgattcgctgcagctgtctggaacaggttgggtgagggcaagggtgggaaaggtggctgaggccaggttgtgagaggcctttcatggcaggctgagggggttatactatagggaggattttaaaaagaggagctggtggactggtgagcagggcatataggtgacacctagccaacttgagaggtcagaatacatgattccagaaggctaaggagaaggctgccagtagaggaaaggggaagaattcccagggcgaggaaaacacataagcctttgcgtgtggagctgtgtaaattcaaggtctggccagggggctgtgagatgccgtgtgtgcttggagcacaggaatgagaagtgaggtgaggaagtggctgggccacctcacaaagggcctcaaattctaggctgagaaactcggacttggtcctgagggtaaagggggccgggagaatgttatgcatggtgctgaagttgcattcaacacagctgtgagaagcatctgtcagggtcaggccagtgtgggaggggaactggaggccagggtaccagatatggtggtccaggtgagaaggaaggggccagaacttggcttggagaacggaggtcagtgccctcagggggtggaggtgatggaacttggtgcttgtctggctttggggagtgagggagtgggtggaaatggggacgtccaaagttctagatggtgtggcaagaattttgtctagatggtgtggcttcctcatgatcatgtcttggggttgagcaggggttctctttggtggggagctgggtagggaggtaatgcttcacttttggatggggcgatcaaattcattcatgtattcattcaaccaatatcgaattgattccttaccgtttcctgaaagacctttgatagattctgagggtagaatgttgaccaggatggagctgggccttggagagtggggaaggcaggcagtaacacagcaggcagtagatcaacgaggccatatcatggattgtgctgtgggatgtgaaggaaatgaacagacggaggacgcagagcagggcacctggagctaccacggtcactaaaagctgctatgaccaagtgttctgtgagctgaaacctgaaggccaggaaggagtcactcttgtgaggggctgaaaggaacatcacagagaggggaggagctagcacaaaagctctccagatgggagaggctggtgcactgggcaagggaaagccagcaccatggtgcccagaagggaaggcagctggggggccagtctacgcagggccttgcagagtgtctgggtttactctaagggcagaggggaaggttttgatcatgacgcactgcagtctgaaactcctgggctcaggcaatcctgtctcagcttcctgggtagttgggactgtaggcaggcaccaccacctctgcctaattattattatcattttttttggagagacagggtctcaatatgttgctgtgtctcagaggggaaggttttaagtcagggaatgattctgtgagcttaaaaaatcacttggaaattgccatagggaagggagggagaaggccaggcatggtggctcacgcctataatcccaggactttgggaggctgaggcaggcggatcgcttgaggccaggagttcgagaccagtctgggcaacagggtgaaaccctgtctcttctaaaattacaaaaaattagccggccatggtggtgcgcgcctgtaatcccagctactcaggaggctgaggcgggagaatcgcttgaacctgggaggtggaggctgcagtgagctgagatcgtgccactgtactcaagcctgggcgacagagtgagactctgtctgaaaaaagacacagcaacaaaaaaaacgagaggggagggagagagtgatggaggcggaggctgctgctgctataagctgggcgtaagtggtggtggtttgcgctggggtggcagcggcgatggtgggattacagggaagtgtgtggcttgctgacaggggtcatgtgcactgacctggtgtgggcagaggcaggtgctatcctggccatcccgcctgcggatgtgtgacctcaggccaatcacacgatctctttgagctctgcttccctcatctgtaaaacagggatcctcatggtgctttccttgtagctctgccctgaggatgctgtgcgtttagcaatggctgttcccgagtgagggctcaataaatgttgcttattgttgtcattatttctggggatagcagtgggggtgggggttgtggccactacagtgccactagttatatggtctgaaactcaagagagggattgtgttagtttcattgtgtctctatgagtgaatacctgaggctgggtaatttataaacaaaagaagcttaattggtttacggttctgcaggctatacaggacgtgtggtcctggcagctgcttctggcgagggcttcaggaagcttacaatcatggtgaaaggtaaaggggtagttggcatatctcatggtggggggaaaagactggcaggaggtgacacgcttttttgtttgtttgtttgtttgtttgtttagatggagtcttgctctgttgccaggctggagtgcagtggcacaatctcggttcactgcaacctctgcatcccgggttcaagtgattctcctgcctcagcctcccaagtagctgggactacaggcgcctgccaccacgcccagctaatttttgtgtttttagtagagaccaggttacaccgtgttggccaggatggtcttgatcttgacctcgtaatctgcccgcctcgccctcccaaagtgttgggattacaggcgtgagccaccacgctcagcctgacatgctcttttaaacaactagatctcatgtgaactcagcgagatctcactcattacctcgaggatggcaccaagccattcatgaaggatccacccccatgatccaaatgcctcccaccaagccccgtctccaacactggggattacatttcaacatgagatttggaggaggccaggtgtggtggctcaaccctgtaatcccagcactttgggaggctgaggcaggtggatcacctgaggtcaggagttggagaccaggtggctaatatggtgaaacctgtctctaccaaaaatataaaattgttatattttatataatacagctgggcgtggtagtgcatacctgtaatctcagctatttgggaggtggaaacaggagaatcacctgagcccgggagttggaggttgcagtgagcctagaattgcgccactgcactttagcctgggcaacagagcaagactccatctccaaaaaaaaaaaaaaaaaagaaaaaaaaaagatttggaggggacagacatcttaactatatcagggatcttggcaagacactcaggttggataattgtctaagtagaccaggggttctcagctaggagccatgttgcctcctagaggacacgggcaatgtgtagagacattttgggttgtcacaacttggggttgggggagggtgctactgccatctggtgggtggaggccaaggatgctgctcaacactctacagtgcacaggatgggcccccacaacaaagagtggtccggctcaaaatgtgtggtggcccacgcctgtagtcccagctgtttgggagactgaagtggaaggatcacttgtgcctgggagggtgaggctgcagtgagccagaagcatgccactgcactccagcgtgggcgacagagtgagactctgtctcaaaaaatatacatactgcccagtaaaatgtttaaaaagtaccttgtgtcccaaaccaaatataactgtgaggccttttgggcccttgggcctccagtttacaactggttgacagtggtctctggaattgttccataaggtaggagccatatgtggcttaaattttgattatgggaaattagtattttttgagacagtctccctctgttgcccaggctgcagtatagtggcacgatcttggcacactgcaacctccacctcctgggttcaagcgattctcctgcctcagcctcccaagtagctgggactgtaggggagcaccactacggccggctaatttttgtacttttagtagagaaggagtttcaccatgttggccaggctggtctcgaactcctgacctcaggtgatccgcccgccttggcctccgaaagtgctggggttacaggtgtgagccaccgtgctgattatgggaaatgtaatacaatttaaaattcaggtcctctgatacaccagccacatttcaagagtgtaagagtcccacgtggctagtgactgtcatagaactttccaccattgcagaaagttctgatggacagtgctctaggatgtagctgtggcaccccagggtcttggggctcgctgtgacagttactcctcttctgtcccccactctcagctgcacctgcagatgctgctgctgccgccctcctgcgaggccgtggcgccacgtggctggaggaggagctgcagctgccccgagtgctgccgcgtgtgcagctctccagtgcggctgcagcgccaccgcgcgttgctttcgacgccggagtccttcgcatgcgcagccagcgcccgggcctcaagtgccccaggacctggcgcagcccgcgagcccgcatcaggcttccagtgggccccgtgggcagtgccagcctttcccacctccgcatctggcaaagcctggccttcgctgcgcttcggtgtcgccacatgccttctggaaatatcacacctccccacctgcgcatgcagccgtctggccctctgtgggcctcggttcccgcatgtgccccgtggaaagaacataccttccccaactatctggcagcgtctggccttctccgggcctcggcctccccatttgctgggtggagaatcacggcccggccacatcggagccaatggctggtctctggacctcggtctccacatttgctcagccggcaggaacatcccttctcccgccctctacctcggtgggtggccacggccgagcaggcagcgacggcccagtggaaagaggacaaacccttgtgggccttagggcgaagacgtaactttgcttagtctcggtttattggccgatctcttgtcaagcggcggaatcgttccgttcgggaggtgggaggggagcggggccgccgggggcgggcgtcttcagtggaccccacgcctccggtcccctccccgcagggcgctccgcagaggcgaggggtgggagcgccggctccaggcggcggaacctccgcactgggctcgcgcgcttccggccggcgccttttcccagggactccgccaacccctcgcacccccgcgcccccagtccccgcgtccccggcgccgccggcccggagctgcccggaagtctcggttccgccgccggcgctcgccaggggaagcccggggccgcccgggacctcggcccgttcctccggacccgagaggccgccgcacggggtacgggggccgggatggagggaggagcctggccctgggacgacgccggggccaggcaggctgggggagtgcgctggagccacccgggatgggggtgggggtcgggagcggcaggatcgggcggagggacgggaggggaagtcgaggcgccagggctccttggggaagtgaaggcaataggaggggccccagggccaggggacaggcggtgtgtagcgggatgggggcgaaaacgcccgggcgctggggttcccataaacaaggggagcagagcaaaagaacgggcgggggaccacgctgtgtgtaacagggagagggatggggctcctggaagaggtgaacacgaggagaaagagagatgccagacgtacacagaaaggaggggaaagtgggcttgggagaggtgctgtgggaagcggagtcccggagcctggtgtgcataacggggtttgggagaaggcccctgatgggtacagaaagaagtaacgatgtcaccgccatatatggggggcgagagaaaagggggcctttggggagaatgtagcaggtagccaggttgggggggcggggtatacagaaggaaggcatttgagccattttggggtgtatagatgtagtaagacgatgggttccgtagtggggagaggtgactagacttcgaggtgctaagtgtaggaacaggatggaaaagccctagtgaaatgtggggaattgggttagtggggctctggggaggtacctagagaggaagtgagggaggccacggaatatgaagatggggaggccctgcggcatgtagtggggacggagggccaggaggccgatacgggggccggtgggggggtagggggcggcaaagggaggggaagtaaactgaactggggctgggcaacaggaaaaaagaagaaaccacagattagagaaatctcggcggtcaggaggcccggggtctaagatgtaaagaggtaaacagatttagggattgattgtctgctggggtgggttgagaggagaaaagggaagaaaagtcgggggactacgtcctcagacctgacctgagtggtgagaggtggacccaggaggagtggcaggtggtggcggggttttgcagagctcagttggaggccctctccgaggcagcttgatggaacgtgggagagccgggctggagtcacagtttttattttgctagggaggtagtcagtggcgcacaaagggtaacaagcagtgatagtggggatgctttccattttaggaaacttttcctaaaaggaagtggcaattttaactaatctcccctccgccgctcccagctgccgctccagatgctgctgctgccgccgcggccaccccaccctcggtcctcctctccggaggccatggacccaccgccccccaaggctccccctttccccaaggcggaaggcccctcctccactccttcctcggcggcggggccccgacccccgcggctgggccgccacctcctcatcgacgccaatggggtcccctacacatacacggtgcagctggaggaggagccccggggcccgccccagcgcgaggcgcccccaggagagcccggccctcgcaagggctacagctgcccggagtgcgcccgtgtctttgccagccctctgcggctgcagagccaccgcgtgtcgcactcggacctcaagcccttcacgtgcggcgcctgcggcaaggccttcaagcgctccagccacctgtcgcggcatcgcgccacgcaccgcgcccgcgccgggccgccgcacacctgcccgctctgcccacgccgcttccaggacgccgcggagctggcgcagcacgtgcgcctccactaagctcgagacccggcctgtgctgccctgcccgtctcagggccaccaagtctgacccacacagcgtcactcactcccacacacaccccctggctctgctgaggttactgccttaccctgggcctcagtttccccaccttccaaagggaggagcatcattccttccttaccccctttctagctgtgtgatgtagaccaaagtcgttgcccctccctgggcctgggaaccagtcggaactgggttccagtccagctgtgctgtgtgagcctgtgcaagtgacatgacctctctaaaccttggttttctgctctctggagcggtgaaccggtggttgtctgcggggaagagatgataaagagcacgggcacggtctggttcatttctgtatctaccccccttccgcccacgcccccgaccctttgctcaataaacattccgcactccattttcaggctcttccttgcgtgtgcgtgcacgttgggtgctggggggtggagaccggatcttcctcgcttgggtactttcctctcggtgtgtgtttctggccggagccgtttcgcgacggcccgggcgccccgccccaaccttccttccctagaccctcttctctcccttcggcttctctctttcggccggcgccgccagttcctggggcacacccagaggtccccttctcgccgccgcctgcaactgcgagggtagcccggggccgcttggagtcgcccggacctgagaggctgctgcactgggtacgggggccgggaggaggaagggggctgggggcgggcggcgggaggggctggaccgcgtggagggtacctgggccggggcgggagtggggcagacgccggagggggctgttctggagcttggagggggcgagaacttacacagaaaggcccagaaagcgagggctgcggccccgggggtggaaccccggagagcgctgggacctagaacgagcctggtggaggccgggcgaggactagagagaacctgaggtgggtggacgggtgggagcacggagttgttcagacacgtggctggagagagggccggaacctgggggtcctaacgtcggagcccctgtgaataggcttggcttgtatggagggggtcaggaaaggcttgagtatgtagcataggccaacacgcagaccctggaaagggctagaaggaggggagggagaggcctggaggcctgcggggtggggcacccagtgacctgggagggcacaaagaggaaggttagagcgaggtccaggttgtgcagaggaggtcaagagatcctgtgagtacagtgtatggtggagcaccgaggctaggagaggttttccaaggaggaagaccctggggaccttttagggggccacagactccagctgtgagcgggactggaaaagagggactgaggggcagcaggatgcagaggtcctgggccgggtatagggagggaaaaggatggagcctgtggtgctgagctgccctcttctatataaccttcttatcccatctcccatccaccaggcctcagccagccctccggatgctggtgctgccatccccctgccctcagcctctggcattttcctccgttgagaccatggagggccctccccgtcggacttgccgctccccagaacctggaccttcctcctccatcggatctccccaggcttcatctcctccaaggcccaaccactacctgcttattgacactcagggtgtcccctacacagtgctggtggacgaggagtcacagagggagccaggggccagtggggctccaggccagaaaaagtgctacagctgccccgtgtgctcaagggtcttcgagtacatgtcctaccttcagcgacacagcatcacccactcggaggtaaagcccttcgagtgtgacatctgtgggaaggcattcaagcgcgccagccacttggcacggcaccattccattcacctggcgggtggtgggcggccccacggctgcccgctctgccctcgccgcttccgggatgcgggtgagctggcccagcacagccgggtgcactctggggaacgcccgtttcagtgtccacactgccctcgccgctttatggagcagaacacactgcagaaacacacgcggtggaagcatccatgagccgggctgccgggtgccccaggtaccacaggactttgcagggagcctggactcctgtccagacacctggtgagagcctgaggctggtgttcagggccctggacacagacacagagcagccgcatctcaaaggcagagccctgcctgaaggaggaatccgtgagtaatcttcaggtcctccgtgttctggagctgagatgggaatgagcccctacacagaatggagtcctctagcctaaagatatcagctgttccatggcagagccttgactggatggaggtggggagtgtggtgtgtaaagtctctggcctcataaaaggtggctgtgggtcgtcaggaatctgcgccatcttcctggggcttctgcgctgttgttggggaagggaccccagtcctgccttccaccccccaaccaggcctgagactgatcaaacaataaacacgtttcccactctgagcactcgaggtttgtttttagagacagcatctcagaccctctttggtggccgtctagcagggagacctcagcttgcctggctggggaatgggaaggttggcctgccttggggttatcccctcctcagctcctgaagacctgggtcatctgggaagaatgtttttaactgaaacaattttaaaaccacaatctcctgttacaaacacattttatatggcaatagagtatacagataagcaaaatacacgtgaaccaagtttcctttttttttttttgagacggagtttcactctttttgcccaggctggagtccaatggcacaatctcggatcaccgcaatgcctcctgggttcaagcgattctcctgcctcagcctccctagtagctgggattacaagcgtgtgccaccatgcccagctaattttgtatttttagtagagacggggtttctccatgttggtcaggctgttcttgaactcccaacctcaggtgattcacctgcctcggcctcccaaagtgctgggattccaggtgtgagccacagcgcctggcctctttttttttagacggagtttcgctcttgtcacccaggctggagtgtaatggcgtgatctcagctcactgcaaccttcacctcctgggttcaagcgattctcctgcttcagcctcccaagtagttggggttacaagcgtgtgccaccatgcccagctaattttgtacctttagtagagatgggtttcaccgtgtttgtcaggctggtctcgaactcctgacctgaggtgatccacacacctcggcctccctcagggcacta[132 bp omitted]cctcagcctcctgagtaggtgggactacaggcgcccgccac[138 bp omitted]cccggcccacaaaaatttctttaccatagttagctttagtttgtgcatttttttttccatcaactattattattactatttgagacggagtctcgctgtgtcgcccaggctggagcgtggtgcgatctcggctcactgcaacctccacctccccggtttaagcgattctcctgcctcagcctcctgagtagctgggattacaggtgtgcaccaccacgcccggctaaatatttttttaaactgctgatttcatcctattctattgaattctccacccatgaacctgtagtttggaaaagaccaatctagggcagatggctccccctggaatttttggaccaggctgcagttaatctgtaaagtggggaggggaggatcatggtcacagctttgcaggcggtgcagacatttagattctccctccatcgggttaagaccttgctcttataagggctggccacagtccagagcttggatgcttctggtgaacaggagaggcaggtggagctgagcctgaagcttaataaacatctgcttattcattcatttttcttgcctattttgtgccaggcactgtgctaggcctcatttgctcttccgacctgtttttttgggaggaagaacaaatcttccgttcatactccccagagtgggaaagagcctcccagaggctgccatcataccccaccatctgacctcaaataataccagcagcgctcctctcttcagccctgacgatggccaggtgctgggctgagcttctgtgtgtcgcatcactgcatcctcacaataaatttagaagggcttgtaatttccccattttgcaggtgagttaacaggctggggaggagcaggaacagtcaggactggaatctagctttgctccaaagccagctcttaattaccaacatggggatgggggtggcgtgttcctggccctcattttccgggagaggggtaactcccccgattttggcccccacatccctgagaaccttggggtctggctgtaggaggtaggggagctctgaggggtccgcgctggctagttcctgagagagcgttaaaagtagattctcctttcgctccaactttctcggtgtctcaaacactctcctgccttctgggcccattgggcacaccgccacccaatccggggacccccggagactcgccagctctccaggatgggaatttcgtgatgttccctgcctgagcttcggggagggcgggggagtgctgtaaggggctatcgcgcaagtgcagaccctctgcttctgccgcaaacggcgggcctcacctggacccggggactcttcaacgaggggcgctagcctggcccgactgggcgagtccccgcgtccctgcccgttccgtcgctcagttccacgacacgctcccctgccgccccgcctgttcgcgggtgggtgggcgcttccctcggctccccgtgacactttgcagacgctccccggcgccgggcatgggcgccgccgccgtcggtccccgagccggattccgcgagcgggtgggtgagcgcggggggcctcggcccctcggaccccgggcacccgcgggcgggggatggtggccgcgtttgcacccccgccctagtgcatgttcccgctggaatcgttccacgaccgctccccctcccacccgcgggacaaagggcgggggcggggggggcgcacccccacgcgtgacctttccccgtactgcgcacgcgcccagcccccaccaccgggggacggtccgcccgcccacgcgagtgcgggggaggggtgtgggggccccgaaggtagaggaggcagcgcgcacgggctggacctcctcctaccctgggaagttggggcagtttccccctgcacctgcctcttccttaggcctggcagtggcccgcgatgagagagggtccttccccttcaggctaggtgtccctggtcaggcgaccccttggggcacccagcaatttagggcttcagcttccttttccttcgatacccaggagcccacgtccccagctcacttctcccccaggacctaggcggctgggccccctgcccctgactccaggagcccaggagtttgaagcccaggcgcgttttgcctcagtcctggggtccaggctccctcctccctcagaccaggggtccaggccagaaggtccctcctgtctcacttcacctcccccaggatggaccctccagtccatctgcgtctctccatttgtggctgccgtttctgtccagtgcccctgaggccctcggctgctggggtccgtaggaagccgcgccatgaatgaccggagcagtcggaggcggacaagtgaggaagctgggtccccttccctaccctgggtcccagtgcggtcggctccaggctgccgtggttggggggtggcctgagaggcccggggaattctctggggtaacccggggcctctcctctccagtgaaggacgatgagaccttcgagatctccattcccttcgatgaggcaccccacctagacccacagatcttttacagtctgagcccctctcggagaaacttcgagggtgagctgagggggtgtggagggactggagtcagctgggaagccaagccctgagtcccagggtgtgacctggtccccccaccctcgctgtgtccctagagcctccggaggctgcgtcctccgccctggctctgatgaacagcgtcaagacccagctgcacatggctctggagaggaactcctggctgcagaagcgcatcgaggacctggaggaagagagggacttcctgcggtgccagctggacaaattcatctcttctgctcggatggaggcaggtgtgtgtggggtgctctgatccacatgcctccctgtcccgctactgggtacccgctcacccagactcaaggctccactgtttggctggctgggtgggacctgccatgttggccctatctgctagtcccctgcctgttttgggcccccaggcccagctgcctcctcacttgattccagggcctcatccccatgaactgtctactggggcccgtcctcctgccttctccgtcagctccccaaatcccatcagcctccagtgccctgccatctgcttccttggcccatggtgacttcagggaccctggcacctgagagcccctctcttctgactcctagggggaccttccttcatctctttggccaagaggcccaccctagttctttgggtttcctcagggggcccctgctcctcctcccgtccctgtcttctccaagatccaagagtccagccatccggcctcctcctgtccccccctcccctctgtgacaccaggggccatcttcccacccaccctgtcccatccttggttaatgagcactccttccccatcaaagacattaagtcccttcctttgtgggcctttttgggtggtgaccccagcaggtgctgtccctcaaaccctgcctgattcctgggcagtccccacccacataccttgctctgctataattcatggccagaagcagcccagatagctcccacagcagcacccagccccagccagttcacagctagcgtcttctcttgactggtgggaccctgtgccctgtttaatacattttggaccccagccccatcctcttccccggatggtcaggccgtttgcccgacagcccatggcctggagaacccacactctaccccacctaccctcatctcagccttgctagctccttggctgggaagacccctcaaaagctcccacatctctctttgtgaattcaaccctttccccaaaaatcctaggcaagggggctatggtcttgtggtgtctctgttactggaagcccagcatctggggatctggctttccctctgctcgggaacaaaccacctctggctgcccttgggcctgccactgtctcctctcactgatggttccatcctgggtgactgactcctttgcacagacagtttggccctgcggcttcggcactttcccagtggggaccctggcaccagagccctcccctaacccgccttctagaggaatctgtgtctgggcctccgcctgccggctccctctgtctagatggaggtgggacccagcctgctggacccagggcccctgatttctctcggtctgaccccccgactccagccaaggccttgcctgcctcctgggtttccagaggctactctccagaggtcccgcccagtccccagaaatttctccctcccctatgggaaccgcgcatagtcacaggggtcctgaggcccctggtcggctgcctccgtaagacctcttgccaacccaggcctctgagaaaatgctccacccattaccacctcccacagaccccaactggctctactcagccaccagcgtctctaccgtactccttgtctctctgtctctttaggggaccagcccaggttgggggatccagttcggggactgcagcctctctcagtcccgggacctgtgatgggatgtctggtcccttggttcatgtgtgtgtctccatctccccagaggaccactgccggatgaagcctgggcccaggcggatggagggggacagccgtggtggggctgggggcgaggcctcggaccctgagtcagcagcctcctccctcagcggagcgtccgaagaaggcagcgccagtgagaggaggcggcagaagcagaagggaggtgctagtcggaggcgctttgggaagcccaaggcccgggagaggcagcgaggtgagtggggtgcatggggcgggcgctgaggggcccgggctgctgaattgctgtgtgtccttcccagaggtccccctttctctccaagcccctccagccttgctggagaaagacccaccgggttctgtctctccctcctccacgtgtggtcctgggtttactttcttttttttttttggcgggggggacgtcttgccccgtcgcccaggctggagtggtgcagtggcgcattctcacctcactggaatctccgcctcccgggtccacgccattctcctgcctcagcctcccgagtagctgggactacaggcacccgccaccacgcctggctaattttttgtatttttagtagaggccagggtt[145 bp omitted]agggccaccttgggcacctccttaactttcatcagtaaggaggaggtgcgcagtaggacctacctcacggggagggtgagacttgaataagtgaattcacctgaggcagggagacgagggtgatggctcggggtgtcggggggtgctgggaccgcgtgggttgaacccggcctcttggctcattttgtctcctcactctccttcctgggcctgcctcttcccatttcccactggtccaagatctggctgcgattcttcccctcctctctgccccttccttgcctgttgttctccgtctccacctgcaccggcccgtgcctctgctcgccgagatcctttcttcccatggccgtttcccttcccgtgtccgccccctcagtcttgtgccctgcccctcactttcgtgtccccgcctccacccctcagtgaaggacgccgacggggtcctctgccggtacaagaagatcctgggcaccttccagaagctcaagagcatgtcgcgggccttcgagcaccaccgcgtggacaggaacaccgtggcgctgaccacgcccatcgccgagctgctcattgtggcccccgagaagctggccgaggtgggcgagttcgacccctccaaggagcgcctgctcgagtactcccgccgctgctttctggccctggacgacgagacgctcaagaaggtgcaggcgctcaagaagagcaagctgctgctgcccatcacctaccgcttcaagcggtgatcgcaccacgcctccgcgcctccacccgggccttcctcccccgtggaccccggtggatgacctgcccctctccccgccgcgcccctgcccctcctcctcgctccctgggttgggggctcccttagccgggcccccaagcgcgacggccccggaccggccgcggccccttcccgaacgccggcacccccttccgcttgggctgcccagccctgtcctcgccgggccccttcctcctggaaaaccaggcaggcgggtgcccccccctcgagtgggggactgtacagaccccgtctccgccctggccccgcggaggagctgcccacctgattcccggacagacctccccaactccgcgtgagacagagaattattcagataatttaaattaaaaaacgacgtgaaaatttggaataaacttggcctcagcctcttcctaggagggggacgtgcctgggagggggcggccgtcgccccgaagacggtgacggggttgcgggggcttccaagggggtgggtggtcaggcgggaggacgggtaggatacggtgtaattagccccccggaggcagagatggagagtgaagcagctgcgcccc[359 bp omitted]cccgctgggctacccagaccggagcgcggcgcgagaggcgtgagtcgatgacctctagcgagggaggccacctagcggccaggccaagtctggaggatacttccgttgggccgccagggggcagtaacgccagatcatctgtctcccggaagtaatgccagatgatccgtctgccgcgcctgcgcggcgggaagagccggagcgcgttgatgtggttgccgagacaaccaagagggtggccggatttaacggctggggattaagcactttcaccgttgtaagggaaatctcgcgcacgcgcaatggggactgaaacctggtccccgcaacccccttcacgggagcagtgggagagcgcgccacagaacgacttttacgcaggcgcagaagcctgtttcccctcacccgcggcttccaccctgcgcaggcgcaaaaagccgcgctggcaacctccgcagcggtcgcgcgcacccttcatccctcttgctgcttttgtctggcacaaccttctcaggccctccgcgaggccggccctttttttctttcactttccccacccggagagccaggtgccgagaactaggacctcgtccccttctctatcccttcccctgatccatctcgtctctgttctccttcccttttccgttcccgaagccggaaggagccgaggtacccacggaaaaagtcgaagctgtccccggagagtgaggccttcacgaagcggtggcggaaggagccgaagttctctgatcggaggcgtgagcaagtggcatctccggaaagagccgaaacacggactcgagcttaatcccaggaggggcccgagggcgagatccggaaatctccggaaagagccgaaggccgggacggttaggattgtcggaagtggccgattgcttggacagggccggcggagaagatcggagcaagtccgtggaagaagccaaagactgggacggattgaattgttggaagaacccgaactcgcagaggggactgggcgcagtggcacacgaggacacacggaaacctccgaacgttgaggagataatctcggaaaagttacggaaacctgggaagtcggcgaaaccctacgttcgggtgttttcggaagcagccgaagcggccgcctgcttcgccttcgtccagtatccggagatagccgaggcgcttcggagccaggctcggggggaggggcaagctcgcgggcgggcgggcgggtgagggggcggagcccgggcggggcggggagggctgccggaggcttgattaggtaggaggtggcgaagcgccggcggcggccggaagtagccgaagccagcggcggaagtagccgaagcggctggagcgggcggcaaggcgaggcgaaagctgcacagggccctacgcggccgcctcagcatgtcggacttcgacgagttcgagcggcagctcaacgagaataaacaaggtgagggcaccggggtcgcggggcggaggtgtgggcggctcctcgcgtcgctctttgcccccccgccattttctccctcgcttccccccacttcacggccgcgcggcgccccccaaccctggttccgtggcgcgcgcctcgttcacgtgacgtccccagcgttccgccgcgcgctaggcgaggggaagggggcggcggggcgcgggcccgtgacgcatgcgcacggcggctgtccctgcgccccacgtggtcctggcggaggtggcgcgggggacgcggcacgagcgcgccagatgcctcgacgtgaacttttgttttttaaaatctttttggtttctctgaaaaggagattatgttagtccccgtaatctcttttctcccgctgccttggcacttccgcttccggtcgggcccacggcagcgtctccacgccccctttgtttccaaaatggcggttgtgagaacttggtgggggggcccctttccttccttcacgtggatgagggcagagccgtttcggcggatgcttggaggccacgggcccctcgcgtaccccttttcctttttgctgatttgctctgatctctcccgccaggtggtttctgccccgtctgttggtagtggggcgcctcatattaacgtgtttggcacatgttgcctaaaagcatctgcattctttgagtgtccgcacgcacacatcctgcatatgcggggcttttggcggtcccgagaatcgcgatatggagtgtttgagacaaacctcaaatcatttacaatcccaatctcagggcacctgataatactcagtctcagatctcaatatagagataagaaaacaggttctgagggaggaagagggatctggcccactgcgctaaactcttcacttacggggaaggtgggaggcaggttcccttcagggtatcgaaaattgtgatgggttagaacaaaaagcctggggccctgatcttagggattccaataatattagaagtgggagagttgttaagacgctttaaaaatcctccgtgtttcagtttgtgaagaaatacaggaccagggaagattggagacttgtttcttttcaggcttcagctgcccatgttcctagctcgttcggaggacgaaatgagggctgaggaattttcctttgaacccgggctagagttgggtaggggctgtattaggaaacagtgtcctggggaagcaataacgtttactgagggtctgactctgtcttagttgatggactgctcaagagcataggctttggagttgagcacatcaggaagtttagatacctgctttgtcgtttagtaactgcttttaatacgtttatatatttttttccatttgtagactgattattattttcttgttaccggattttgagaagattaaaaaggatgatagtaacgatagatgtagttaaactctgagcgcttaccgtgtgccaggctcttcgctaaactcttagcatgttttactaagtggatccttttaacagccttgtgaggccaaaatgatttccacctctactggggaggaaactgagggctcagaaaagttaaaaactttctcagggctcagctagtcagaggcagagctgagattaaatggggtaacatgtaaagtgtgtggcatgtggctttgcgtacactgggtgtgcagtaagcgatatttgcaattgtaaaattccatgcttagagaggagggtcttccgctcacagagattgtgtcagagttgggaaagggcaggaaaaggtgctttccaaatgtcattctgccacacaacacctggatggagtagatacgaccctcgtttaaagagaaaaccaagtcttaaaggctaagttgcttttgcatggtttttgttgttcataagcagaaaagcaggtactgattctgagctctggctgcaaggccaagttccactctgctggaccaagtggagctgattgggcggttctttgaggctctcagatggtgcttcaccggttctcccggggtttcccttttggtgctggtagggcagtccctgagacctggcacggctcctgggttggcggagctgctcccataagatgaccacaatacagtgttttgagcaaacgaagctctcattgtttttacctgtccagcatcagtgtgtgggagagggttcttgccataggggaagctctgcccgcgtgtcactgcctgtagtctttgtctctgcggaggacgggccagcttctgtacgtgtcgccttctgcttcagtcctttcctctgctacctgtatctacagggaatttccttgtctatatcccaggcacccagcgggcatcattgctttctctgcgtgggttcctgtctgcctgcttgcctgtttcagagccttagcagcagaaagggctcttggggctcacagcctgtccatcttataagcgaggagctgtgcccagtgccgtgcctgtgtgcccgctgctctacactgctggcctgtcctgccgattgttcctcccaatttcagtttttgattttggggtttttggccttcaaggggacaattatattgtcattaatggttctagccagacctgagtgttctgcctgatccacattcgagagtatggcctcgtgcttaactcactgatgtcagagtgtttaaattctggtgtcaccatttcctagctgtttgaccttggtaattgtgatctctctataccttagtttccttacccattatgtcagcccccagcagtgtttttccgaagcagtagtgaggattaagaacaaacaaaacaatttagtacagattccggttgtaggaagcatctcaatatttgttgctgtttttttccctgctgggtgcatatttttctgagtgttggtggttttggaattgtgatgcttttccagacattcacattgcatcgcaaaaacgtgagacaaaacactgtgggtgaggctgaagtttaacatcctccctcagtgccctttcctcctcttgtccccagggatgatcactccaggagatgcgtgttaacatatataagcaccttaacgtgtgcatctgttttgtgtgtgtgcttcatggctagctgagaaatctgggtgtctttgaattaaggaaatggtgtggcggtgctcatgaacccccccgcccccccatgctcatggtttatcctccatcttgaagggccggtctctcttcaggggttgaagggtctggtgagagcagaggtttctgtggttttgccagtgaggctccgttcctagtggctacctcaggcaaatagagggttgagggagcctgctggaggctggcagagatacccgcccctactcacgcctttacagtctcttcagtacttggctttgaagggagtgaggctgagagattcaagtggtttgggattcaagtctggatggggcaagctcctcccctgacctgctgaaggagaggagggcctctttccccttcagtctgcagattctccgaggcccttctcttcccctgggaagggtgcttgcttctgcattattcaccggcttgggaagggatgggttgagtttccctgcttcctggggatatcagatcctgcctggcacctgacccctagtcctgatggtggggctgtgggtgccagctagttgcagaggtctttcctgaggggtcgctgggtcccttcaggaaaacatcattgggtctcttgattccccagcctctagccctgcccctctcagggacgaccctggggtcaggcccctcagccctcgagggggaccaggagccagcctcctctgtcttctctggctccccagctcctcctgagcatcctcaggtatcttacaccccgggggcatttccaggccccgtccccctggtcccctcatggtccctggactcgcttgtggacccaggaggcctgttaattcccttcctccattgaatcccttccctttgggggtggcctccctggggcttgggacatagccaccagcgcgcagggtgggctgggcccgcatccttactccgcttatcccgtgcccctcctctcacccttgcccagagcgggacaaggagaaccggcatcggaagcgcagccacagccgctctcggagccgggaccgcaaacgccggagccggagccgcgaccggcgcaaccgggaccagcggagcgcctcccgggacaggcgacgacgcaggtactagggctcagggatcccctgggccagcctgggagtcggggggtcggtgttggccggcctgtgggtggcctgtgtgtgtctgtgtctgggtccgggccctgtgtggctcgttcgttctttgtgtggatctgggggagggatctactgcttggtctgtcttggattccgattttttcccccgtttctggggtttctttcattttctgtcttggtggttgctggtgggttgctgggggcaataggctctttatctggagcctgggaattgattctgtgttttccttcacaaggggttgttctctgtctctgactctgagggcctgttccttcttttcgactctctgtggctctctgtgggactctcttcgagggggttggtctctgcctccagtttctttcttccctgcctcccaggagaagggagctcttgggaccgaggcagtatccacagcctgggctgactttttggcccaggggtgtcggtttccaccgcctcttcccttctaggctcccctttctgttctctgcctccttaggtgaggaagggcaggataggcggaagtcctcctgcctcctcccggctcagtttctccagctagagactggtccttcctggcccctggcccctttctcctttcctcacttcctctttcctgggggtgggagtgtttggggggaaatggcagggccgagggtggcctgcttgctgcttgttgacctcggccctgctcccaccctggggctcagtgcccttgggggggtgtggcatgtggggaagacgagggtccccagtcacccctccccatacctttccctcccaccccccagcaaacctttgaccagaggcgctaaagaggagcacggtggactgatgtgagcttctcttcctgccccttcctccctgatgtccactcccttcaccttcctcacgcccgtgcaccctgtcccgcccatttccagccctggcccaagcactgggaagagtccacttaccttgaaaccagcacccctttcccaggccctgccccagaccctctccttccctggagagagtggagcttacatggttgcggggagggtgaaagggtgcctgggagggggctcgcaggcccactgttggtcagactgaggttgccctgccccgctctcccctcccacctcccccagtcgttccccccgccacgagaagaagaagaaggtccgtaaatactgggacgtgccacccccaggctttgagcacatcaccccaatgcagtacaaggccatgcaaggtaggcccctggccaggctgctcccagagcgggagggtacaggggttgggattctccgtcagtcattcccctgcgtgtgtgcttggagggggtcaaagacacaggtagagggttgcacacccctgggggttctggtctctgcgcttttgaagcctccctagaggaggaaatgaccagagacacccgtggttgacaggggaatgaggcctccatctggacgccattaggaagtgaggcttctgaggagcagcagttactgggtgggggccccgagggtggaaagagggttctggaaggtgctaagaccgagagcctgtaggagctttctgctgaggaggggaactcccagtgtgtggtgaggggtggtcactgagcattcccctgatggggttttatccggcttttattccctttgaagctgcgggtcagattccagccactgctcttctccccaccatgacccctgacggtctggctgtgaccccaacgccggtgcccgtggtcgggagccagatgaccagacaagcccggcgcctctacgtgggcaacatcccctttggcatcactgaggtactgccctcccctgccccctaccctctcccttgtccctctaccccgttcctccccttccctccattccctttccccaacctgcacgggtcagactctgctcctgcaagaccccccggccccctcccagacggaccgatggagttgagccagccaggggccgggctgggggtggccctccctccctcctcttcccctctcccgtctcccctccccccaacctcctccagcaacccagggatcaagcacacacataatgtacccacgtgttgtacctacgtgtcggagagagacagagagggagacttggacacacacacacacacacacacacacacacacacacacacacagacgcacgctgcccctcagtttttttctgacacgcctctcgttctctgccgcctgtcccctatcctctcccccacgtccctcccatggtcgctgttcttttatttttgatcgcccctgacctcccccttccccaccactccttttccctctcccctctccccaaccccttcctgtggcaccccctgagaatcccgagatcaaagagttgtttccatttctctttaaagtgaaatattgtggggctgagatccctcgtagcaacaaaaagtttgctaccatcgtcgaaggcaagtaaggtccattctgactttctcaacctgcactttgctacatttgataaaccagcccccggactccagggccagattcctccacatcactcttttctcctcccctcccgtccctgcccctcctccctacactcctcctctcctgcccctgcactcttgacttcctcctcctcgctcgtctctgtcctgctctccctttctgtcctttgctcgtctctgcccctgcctgccacttcctttctactttcctgccacttttctgtctgtctccactgggtggcccttcctgtgtgctctgtctcttcatctcttgtgtttcgtgtttttcttcattttgtgttgtcatcatgccctctgccttttcttgaacaatcttctcctttcccctgattttttggggcccctgtggctgtcccccaacgcctgtccatcgcctgcccttggccgtctcttgctactgcttcctccccattttctctcttgcttctgttcttactattgacttctacacccccacccatattccactgttccttccccccctcctccctcccctcatccctctccccttacccccaaacccctctgtgtctccctctctcacccttcccctcctctctccacctcccttcccccgcccccccccttgtctcctattccctctgcaggaggccatgatggatttcttcaacgcccagatgcgcctgggggggctgacccaggcccctggcaacccagtgttggctgtgcagattaaccaggacaagaattttgcctttttggaggtgagctgggggagtgagtgaggtccaggaaacgtgtgtgatgtgagggcccagcccttaggctgatgttgtgtggagctgccttgtgctgtttccaccaggccctctgcagcctcttctccacccggtcgctgaagtgagccctgttatagcattacagatctgatcctactttctgccttccatttgctttctgtgtgacctgagaggcctgtttggcctctgtagacctctttggccttttccagaccattccggcccagtcctctctgcactctggccacactgaccttcccagaacctaccatgctcctgcctgcttggctagagttctttacaccagctaactgatgttcctaactagtcttctgttaccccagctaactgatgttcctaactagtcttctgtgtctgtgtttctcaactgtcgggaaaaggccttggtttttgattttcgactcttggtggactgataactctcatgaagtattgtgaaggtgtgggcagtgttagcttactgcagagatttctgagcactccctctcactgtctgagcactccctctcactctgtccctctcactctgtctttgcctcactgcagtccacttgcagttgcattgctccggagatgggctgaaatgtccccctcaccagaaagactccagtactgtcatctccccgttcaactaacctttcccgtaacatcccttttcagcactttgtccctcttccgtgtcatcacagcctgcaattgtgtgtttgcctctgtgtttgtgttgggtgcctggtgtttttaatggtcgagtgtgagctcctggcagcagggacatgcgtgtctgttgtactcccagtgcccagcctggggcctggcatgttgtatttgttcacatgagtgaaaggaaagaggaaatcccaatcctggaacactaggggctgtactagtccctgacccccatccctcaccactcctttctctttcattcagttccgctcagtggacgagactacccaggctatggcctttgatggcatcatcttccagggccagtcactaaagatccgcaggcctcacgactaccagccgcttcctggcatgtcagagaacccctccgtctatgtgcctggtgagtgggggatccattaagggcccctttctcccccagtcctgttcccatggcctgtccatcccttcagcccagctggagtggcttaggaagttgtgtaagtactgtggaagataggtgccttttccctgcttcccctaagtctctgtgagtggggtgctctcctgctggtagagaaggtgcctagggccgggagaatgagctgtcacctgctgaggacacacagcttgtacgtggcagagccaggatcagaccaaaggtgctggggaagcgaggggcttgtggcctggacctcgtgcctgcgttgcggctgtgggaccttggagggctcagtctgtgcccgtcggggctgctgtgtgtcgacggttggcagcaaagctgctgctgtggggtctggcacctgggtattcacttgtttttgtctcctagtgtttgccttgaatcttgtgttctgggccattccccatagctgtgttgaacatcatctgtaattggtaggtaacatagcagaccaggggttggcgaccatgtcactgtgtgtgaaagcagccggacggtgtctgcgtgcgtgggcctggctgtgtgccggcacacctcgacacgcgtggctgctgaggttgggctttcctgtgcttctcacaggccacagaatggtctccctttagaaagcttgcaggatgtgcaaaaccaggtgatgggccctgtcagcccacaggctatagttggctgacccttgtagctgatgaatgggatttgagggagggcttgtctgatgccctgtcagggtgcggctgtgtctcaggcctgggacatggaggaggtggggttctgctggcgggtactcactgttcgaggagccctttaggaactgagtcagctcttcagggcaggcgatgtggagccccagacggaggcacatctgtgtcaggcaggacttgggctaggtccctcactggcctccagtgcttttctttttgttgttgttgttgttttgagacagtctcgctctgtcacccaggctggaatgcagtggcacgatctcggcttactgcatcctccgcctctagggttcaagcaattctcctgcttcagcctcccgagcagctgggattacaggcacctgccaccatgtctggctaatttttgtatttttagtagagggtgggtttcaccatgttggtcaggttggtctccgacgcctgacctcaagtgatccgctcacctcagtctcccagagtgttgggattacaggcatgagccactgcgctcagcccagtgcttttccatcatgggttttggtaaattcagctaaccttttggagcctgtaatatatgttgacatgctcccaatcgacatggactttttacgtatgggtgcgtttccccgatcaagctgcagaatgtcttccccacgtctcttcctggtgaatccactgcgttttcattcattttaagtcccatgagtggcccgccacttgctggtgcttagtgtgtgtcaggcgctgtcctaagtgccctccatgcacggcagttctacgacacagggattggcgctgtcctaagtgccctccatggacggcagttctacgacacagggattggcgctgtcctaagtgccctccatgcacggcagttctacgacacagggattggcgctgtcctaagtgccctccatggacggcagttctacgacacagggattggcgctgtcctaagtgccctccatggacggcagttctacgacacagggattggcgctgtcctaagtgccctccatggacggcagttctacgacacagggattggcgctgtcctaagtgccctccatgcacggcagttctacgacacagggattggcaggttacaactgagagtccaacgctggcccactgcctgttttttgtttttttgttgtgttttttgagacggagtcttgctgtgttgcccaggctggagtgcagtggtgtgatctcggctcactgcaacctccgcctcccaggttcaagcgattctcctgcctcagcctcccgagtagctgggattacaggcatgtgccaccacacctgctaattttttgtgtttttagtagagatggggtttcaccatgttggccaggctggtctcaaactcctgactttgtgacctgccttggcctcccaaagtgttgggattataggcgtgagccactgctcccggccactgcctgtttttgtaagtaaagatggatggcggtgcagctggcctcactgtgcagcgcctccttcctgggtagggacgtgtggtgggccttggggaataggaaccgtgggttatggatctaaggttgcttctcttaccaggctgaggagcttgactcttctgaaggtgatggggtgctctggcaggggctgagctgagggcaacccagtgatagtggctgccgagctcctctcaggcgccccctgcaccaagatggcctggtcaccatgggaggggacattgctccatcttacagatgaggaaagagcttcgggacaatggggatccctgctgggtcttccccacacagcctctgctccaggtgtgatgctttgtagatgcagccgctgcagaggtatggggccctgtttccccgcccaactcttggaacatccctgccaagcagggcttgtcctcagtgatgagtggaggaactcaagactccgagaagattcctttgaagttgttgtcatgtaacagcggctgaccccactgacagtgctcacagtgtgtgtctgggctgggtgggtcctgttgtgggcattgagtctggcagatgcccgggccatggggactgccgtgcctgttctcacgtcctcgattgaatcagcacttggcctgagctgttctcacacacgtggctcacacgatgggcaccagggttcttcccattctacagatgaagacactgaggcccttggaggctcatatggtacaaacaagacttgaacccaaggagccatgaacccagggagcccaactcttgtatccttggctctgtgttgctcaagtgagacgggcagagccagggctcgcggctgagcttccagtgtgacccattcttccttggacccaggcagagcctgcagcctgccatgctgcctgtggggagtcacagctgagtgtgggctctggaggctgcctttttcctgcctgtgtgtctttgctctgtgcctcagtttttgccttctgtgctgtatgtatagcattgcagtaggaggttgaaagtcttacaggatgcctggcccatggggtgagtgcccggtgtgtgttcctgctcccgggctgctgctacttgtccctgtagcataggagctgggtctcctggggtctgtgtggccccagtctggtggttggagctggctgggttggtgcttccagttctgtgggggcagcgtcatcatgggctggaagggcttgagtgagtaggtgggagagggtgtgtgggggcatctcccctccttccatgggcacagcggctcatgcttctgaggctctttcccatttcctgtcttacctattccttcccagcatcaggatggaggtgggatggggccactcacacttggtgtggaggctgcagaggaaggggaggccatatggcctaggttttgaacttgggagtcaggctggttggttaccggggcctggcatagctgatatctgacaggacggcgtcaagttacattggcagagcctgtggggtctcaggttgaatcatcccaccagcaggcacttgtctgtgagtccagagttcagtggatagggcaggatcgagggccagtaaattcagctgataagcccccactctggtatgtcagccctcgaagacactggatcctgcatcccacagtcagcccacagttcccagtgagatcagagcagctaatgctgcggatgctgttctgagacttcccgggcagccgcggctgctcatcgtgtcgtgccacccctgtgagggcagttgcacccctgcagtggcacctgcagttctgacagggcgtgaagggaagggactgagcttttttttttttttcctttgagatggagtctcactctgttgctcaggctggagtgcagtggagtgatctcggctcactgcaacctccgcctcctgggttcacgccattcttctgcctcagcctcctgagtagctgggactacaggtgcacgctaccacagcccgctaatttttgtgtttttagagagacggggtttcaccatgttggacaggatggtcttatctcttgaccttgtgatctgcccgccttggcctcccaaagtgctgagattacaggcgtgagcccccgcgcccggccgggactgagctttaatgggagccttgcctgggtggctgtcagagaaggggtggggtgtgttgtgactcaccagtaggtcccgagcccaggtgacctgccagcattccacagcagcaggtagcagatgtgggtgtgaactttgtgcctttggagcgttctggaggatgttctagtttgaggttcccctgaggctgggcagatttgggagacatggtgcgttctccccgaggagcctctgtgtgccactgcccaggaccctcactggtcagataaggctggggtggggtgggcacgtggcgacccctccctcgtcagatcaggcaggaagtgttctctttggcaattgaggagctcgccgtagactgtccaggttttgggagataacctggtactggaattgaagtcctcctcttctctacccataggggttgtgtccactgtggtccccgactctgcccacaagctgttcatcgggggcttacccaactacctgaacgatgaccaggtaacttccctgcctccctccagacccgtccccccaccccgccccacctcatcccagccctgatggactctcggctactgcaggtcaaagagctgctgacatcctttgggcccctcaaggccttcaacctggtcaaggacagtgccacggggctctccaagggctacgccttctgtgagtacgtggacatcaacgtcacggatcaggtgagtccccggtcgctggccgctgccgcgtctgtccttccctgccctgcgctgttgccaagccatggtctcccctcctcaggggacggggcgggaggcggccaacctgaggcagtgccctgtgtgtgggctcgtccctgtcccatggcgttggctttttccaggctcttaatcccctttgccttcccctcttcccccaccaatgccccggcttgggggtaggtgtcgggctcctggtccctgaccccacctctccccgcaccccccgacccctcatcctccaaacacaggccattgcggggctgaacggcatgcagctgggggataagaagctgctggtccagagggcgagtgtgggagccaagaatgccacgctggtgagccccccggcacgtcatcttccattggcttgagggaccctgggggtgggaggggctggctagtaggggacaagtgttcctgatctttctcccagctttcatgggaaggcatttggggggcattcagtgcagtgttggggagtcgggctttaggtgttggaagtggagagatggcctttcccctgggggggcatgtgaggggcctaggcttgagcagagggagactgggtctgggccccctgtgacgccgctgcctcccctggccccacagagcaccatcaatcagacgcctgtgaccctgcaagtgccgggcttgatgagctcccaggtgcagatgggcggccacccgactgaggtcctgtgcctcatgaacatggtgctgcctgaggagctgctggacgacgaggagtatgaggagatcgtggaggacgtgcgggacgagtgcagcaagtacgggcttgtcaagtccatcgagatcccccggcctgtggacggcgtcgaggtgcccggctgcggaaaggtcaggaggcctcgggctcagtgctctctcaccctctgcccctcctcttctccgcgccctctttcttcctctcttgctccctcaccctctccccctcctcttctccgcgcgctctttcttcctctctctctcctctcgcagcgcgtgcgtataggtgtatgccatcactgagtgccgccctcaggccgggccatgggagatgttggtgaccctgaggggtttgtggccctgtgggggcccaagacctgcaggcgagacagtagttggggaatgtagctctgtatcgctgtagaacttggccctgctcccccttatatggcctggcttgtgcaaatggttttgcctggtctgtggagtggggaagagtgccgggaacagtcccgagacacctgctggtgtctcctgtgtgccaggcaccctgccgaagctgtgtctgtgctcaccctgagccctccccgtagcccctgagccccatcgtggaaggagacaggcacagcgggggtggctcacactggcaggtttcaggttctcggagtctgatttcagactctgctaagtcctgtcacctccagcgccgtgacaggtgtaatcacctcacctctctgcctcatgagatggtggtggtgagggcgtgtgacctgctctttgatccccttgctgggtgtatgtatggaattcccatcgtaccaggctctgatctagacgctgagggttcagttgtgaatagaggtccctgctgtccgtgcaccctgctgtcccgtgcaccctgctgtcccgtgcaccctgctgtccgtgcaccctgctgtccgtgcaccctgctgtcccgtgcaccctgctgtccctgcaccctgctgtccgtgcagctgttagaggacctgcatgccgtattgagtcggggcaggggccgcattcctgggtgtactgttcgttcagggtggtcaaggtcaagaggtggcagtgagcaggtgagtgagcgaggtggtggggccagggctgagtggcaggccttggagggctgcctgggtcttggaacgaccgcttattttgagccagatgggagggaagcaatactgagaggcctccagggtggtcacgcctggcagatggaaatgaccccacatagtgaggttgggggtgggtgcggaggcacagcaggtacttcccctggccctggcttccctgctgagccctgcagggcaggatgtggatcagcaggagggcagagagggtgctgtggacaggagggcttgccgggagctggcagggttggtcttgccaaagcgatgccacagccaggtttgtcaggaccaaggctggctctgcagggccagatcgggcgtgggggccttcttatgtcatggaagcagctcggctttcccctggagttggtggccttttgaaggagaaaacaggactgtggtggtggcatttttgaggtgattgtggctgcagttgggaaaatgaatgaggtctcccgcaataatctggtgaaagatggtgatctgatttaaagtagtagcaggggatggagagaagttgatggatttgagggagacttgtgcctgggaagtgtccagactttggtgatgggtgtgggtttgtggggaggggaggagaaggcctatgagctgcttagtggcagctctgatggtggggatggcaggtgagatgcaggggtgatgagcaccttgtcgggggtgagcggggggtggggggcagctagctggctttgcggtttctgagacacccagtagagatgtcaaggaaaaattagctggacaggtctgtgttcccagcatgagggctgatggacactcaggtgtctgtcgaggccctgcttgggatgtcggagtggtttgcccagggagagcagggttggggagggcggctggagaggtggaaggagcatcttagaaaaggggcatggggaaggccaacggcatctcctctcactgcagctcctgcccactgccctccagagtccccttcccttgagctggtatgtcagggctgctcagggctgccctctggtgctgggatggagcttggctcaagcaggggctgaggaaacatttgtgggaagaaggaatggagagaccctggcctttggga[141 bp omitted]gaaaccccatctctactaaaaaatacaaaaattagccaggcatggtggcggtgcgtgcctgtaatcccagctactcaggagtctgaggcaggagaattacttgaacccgggaggcggaggttgcagtgagccaagattacgccactgcactccagcctgggtgacagagcaagacatggtctcagaaaaaaaaaaaaaaaattactgcattgtattgttttattcttaaattttttgttacatgtcttttcaaatatacttaaaagtagggactatgatagtgatacgtttttatcatagtatatgtgctaatattttggtgttccttcatctggcttcaagttaccaatattttgtcattcttaattttcatattcagcttatttctcccccctcctttttctttgctggattattttaaggcttatcaggtttatttcacctgagatccttaagtatatttctattatttctcaattaacattttgggtcagataacttctctgtgggggcctttgctgtgcgttgtaggatattgagatgtatccccagcctccacccaccggatgcaagagcactactccctgctgagacacccaaaagcatctccaaagattgctcagtgttccctggggacaccccccctcctccagttgacaaccactgctctaaccagataaccttaaaaaattgttttgtttttttaacaaaaccacaatagcatgattagatta[133 bp omitted]ttttgtatttttaatagagacagggtttcaccgtgttagccaggatggtctcgatctcctgactttgtgagccgcccgtcttggcctcccaaagtactgggattacaggcgtgagccaccgcgcccggccaataatttttttttttttgagacggagcctcactctgtcacccaggctggagtgcagtggcgcaatctcggctcactgcatccttcacctcccgagttaaagaagagtagctgggacaggcacccgccatcatgtctggctaatttttgtatttttggtagagatggggtttcgctatgttggccatgctggtcttgaactcctgacctcaggtgatccatctgcctcagcctcccaaagtactgggattacaggcgtgagccactgtgcccagccgaggatattttttatagtttgtttcagtaaggatccatatcaggtccctgccttgaatttggttacaaagtttgtgtaatttatcctttgtacctcactccctcttttttttttttgcaagctcttttatttgtagaagaaataagttcatctgctatatagaattttcagtgttcgtgtaggctcattgtatccttccctccctccattttcctgtaaattggtttaagcaaggttagaagctcgaatagatcaaggttcaagtttttaaattttattcaacctgggtttgaatcctaatttctgagcttcccttagttcacttattgttgggagaacatggctgttggggtggttctgggagcgcccaccatggtggctcgtgtggagtagacactcagcacgagggacccctcccccgcggtgagctcgtctaggcctcccgcctgcgctctatggctctgctgagtttctggcatgtctctattctttctccctctccatgcctatggtgtgtttatgctcttgttttttgatcctggagaatatttgggtgaactccaccaaacctgcttactaagggtccctttctgacacctgtggcgaagccccctcctccctgtcccttcctgccttcagtgctggggttgggtggacgctgactggctgttgggcgtgagccttgttcacaaacctgcctctcctttccccacagatctttgtggagttcacctctgtgtttgactgccagaaagccatgcagggcctgacgggccgcaagttcgccaacagagtggttgtcacaaaatactgtgaccccgactcttatcaccgccgggacttctggtagaggcggctgggggagggtgggggcagggctggctgggggcttctccccactcccgccccccccttatccccctctgaagacgatgggcagaggagtgacagccgcagacacacgacagccggcagcaactggaatggcagcaattaagggtggggggcgggggttggggggttggggggttagggcagggaggggactggggaagtgcgcacacagcccacacagacaacacgcacccacacagacacagagggaaggggttgggatggggacagggtgcacagcagggcggggtaggaccccagcccctcccaaaacagcctctccttctcccatagacccctttcttctccccttccccacggtaggaacatagcgtgtttatattttatggccaaactattttgaattttgttgtccggccctcagtgccctgccctctcccttaccaggaccacagctctgttccttcggcctctggtcctctctggtcccctcctgggtttcttacgtagttgatttttcctctttagtctcccccgacctgcgcccagccccgtggcccctgcccctctcctactctctgtggcagtttcatatttgctaagacgaatttgctcattaaacattttgttgtattttactttatggagcggctgtgtgtccagtatgtccgaccctcttcctcggttctgggctcgggtgggggttcccttggcaaactgcgggcccctggctgggacgcccctgctgccggcgccggcagcctcgaggccttccctgcttgcgcggtgcccttctcggggtcggcacaggcacagccccgggggacgtgaggttcccgagtgctctcccaccccgccgacaggagggatggtggccgagcgggccggggcgggcgtggcgtgggtgtgccaggagctccgcggttgccgccaagcgagctggagctgactctcggcgttccgtgagcaccgcgcggatcccccgctgcagcgggcggaagtgacgtagaggcgcctagcaacggggcccagcgcgccggaagtgatgccttccaggttggcttggctgcggaagcgactcctgccagggcggggtgcggcacgggagggcggggagcgcggcaatttccgcttccggtccgtcgcctccttctgttgcttcccgtctcctcggcggctcccctcccccgcccggctctccgcgccccttctgggcggcggggcggcggagccgtcggcgtgcggccctccttgcgttcgtgcgtgcgcccgtggcccggcgcacgtcccgcgacaccgaggccgagcggggcagggggctgaccgccatgaccccccagagcccggcgtgagggggccgaggtgagcgcggggcggagcgcgggggacgctggcccgcctgctccgggtgttcgggcctgggccgcggcgcgcgcgggctcgcgtctggccagttctgggtgtctctggcggcctttgtgtctctgctcctgtgtcggccttgactgcccccgtgtcggttgtctgtgtctgtctctctcgtgtctgtgtgtctgtcagcgtctgtttcctgtgggcctctgcctgtgcctgtttcagtgaacttagaaaagggtttggagataggagtgtgtttgtgtgtctgtcccgggtctctctctcctctgtctgtcgtgtctgtgtctgtcaggatttgttcgtgtctcgttgagtttccgagtcttcttttccctaggtgtctctagcccttccctgcgggcttttctgcctatggtgcaaatcttacccccgccccgtcttcgcatctgagttttgcccccatacctatcacctccaatcctgaagtttctttccaggagtctgttaacttgatctagaatctgccccttttccccagttttctgagtctctggtgtgatggtgaagagccccagccttggattcagaagcccggctgcctgctaagctgtgtaattgccaggtgatagtctctgtgtcaaaacctcagtttcctagtcgtaggaaatccatagttcgtaggcattcgtagttcctacatcatagggtccttgtgcatgtaagttgaggtgatgcttgtaaagtgcctgacggtatctgacacatagcaagtgtgtaattactgggagctctggtttttattattacagtgcttagagatttttacacagtaagtgttagatatcggtcggttattggagtactccttggagaactttgccatatcctttgtattctttttaatgtaagaattctctttgaatcaatttaatttgaaatacagtctcattctaagcagtatctgagaaatctcagctttgatgtgctagttgggtaattttttctaatgcacgccaaataagtacagagtattaagatagtgccttttctgccgccacccttttggaaatgttctctgttttttctctgataataatagcagccagtgttattgagcgcctactatctgtggggcacagagccaagcactgcatgtacccatcttatttaatcaacaggcctaccaggtaggaattctttcatttcagagttgagcaaactgtgtctcaaggaggtgtgcgctgcaggtagctgatgtggccaggatttgaacccacattttatattctttgccattagattccatttttcttatctcttatttctcagcgccaggtctctttttgtttctgggcctctttcttccttggcctcctgcctccctgtcttcccatgttcttgtatctgctgctgcctgtgtttttctcattgtgtctctgcctagctccctctgcccaggtttctatgtgtctctttctgtcagaactgtcttctatttcttctcagtccccttctctgcatttgttacatcatctcttcatcttaatgtattaggctggggctgttttgggactccagagagttactttttaactagctacatctgtcttcaggtgcctggctttctggcctgaggtggaagcagaggccagcctctctccgtcatccctatctcccctgggcttacatcatggcggggctttgaaaatctccctctgtggcttcttggagccgcatagatgggtgatcagagctggctctggaaccaggctgctccaggagtaaggtgtgtgtccctgggcaaggggctgaacctctgtgtctcagtttccaccctgtgaggtggctatgaatcatggggttgtttcaaggattaactgagttaatacatgtaaagcacttaaaacagtgcctggcatgggataagagcagtgcgagtgtctgctggtgtcatcatcatttgcttgactctcttgtttctcgtcaccagtctcgggatgggttaatttaatttaggttaatttaaaagtatgagttttggagttcaggtgggcctcgggttgagtctgccctgccattcctggtgtgtgaccttggttgaattatttaacttccaggagcccagtctttgcatgcagtgttgaaaaaggtaatgtccctcttgtgctgagcgagcacctggcacacagcagggacccaggcagtggggctgttaggttccttatctctcctgagccttgggcttccgctatccttgggacgtctggtcttctggcttccccggttcttcctgccgccctgggttggttccctgctcctgcctctgtctttaatcccttcatcagccttctttcccatgtgtccttgtttctgctgtggattcctgccccctctgcccttgttccagaggtctttcctgccctccctctccacttcctccttgcatggtttactgaatggtttttctgggccagcttctttgctgggaaaagccacatgcagacagacatgttctctgcccccatggggcctgtgggttgaccttagctacagaatcagacgagaatataaaatcatgagggagactgagtttactgatgaggccccagggataggtgactgtgatgtttgggtgtgcacctgggaagtgtaagcagagcccttggggtgagtggatatccctggatgaggaagaaggaagagcgcatgggcaggacggagggcctcctgatgcgctgccggtgtttacagggcgtcagttctctagatgaccgcatggagccccatttgacagaagagaaagctgaggtgcaaaagatccagcccgcccagggtggccttgccaggaagtgctgagccaggttgtggggctgcgatctgccactgcatatactctgcctcactgagcaggggccccagcaggaaggaggcagcctgtttgaggaactgaaacatggatggggttactttgagacctagaggttaacaagggacagagccttctgggccacagttaggaactcatctttgaccctgagggctctgggcaggccatgtcccatttgtgtttccagaggtcctcttcccctcgcagatgcggtgacctgccagcacctgccgcagccttcgtccgggagtcgccccatctctccacgcatcggggccctgtgccccttgctgctgcagccgggcaccatgtcgacctcgtccttgaggcgccagatgaagaacatcgtccacaactactcagaggcggagatcaaggttcgagaggccacgagcaatgacccctggggcccatccagctccctcatgtcagagattgccgacctcacctacaacgttgtcgccttctcggagatcatgagcatgatctggaagcggctcaatgaccatggcaagaactggcgtcacgtttacaaggtcagcatcctgctctcctccccgggcaggtgcaggggctcaggtgggaggacaggagcccgtgttgtgcaccctgcctgggatggcatcccggttctcaagaggaactggagaagagtaaaatctctctttttgtttaatgaaggcaacgaatataaggctaagaagtttggagccttgtggttaaaatctgtttttgagtgagtggtgcgtacgtaagattcatgtgctgaggaggcctgagagggcccacggtgcccatctcttctgtgtgcccagacacccagttcctttcctcacagcagccaagtttccgctctgggccccatctatgaatgcctctcaggcaggtgtgtgctccccgtggcacaggcgatgccacgctggggatgaacgctgtcgtgcctgtgagcaggactcagcgactgggttttcagtttgctgctcttggggtccaggggccttggcatccccacctttggtctttggttactgtgttcctcgtgttacggcaaagtggccaaggacatgggctggggccgggttatactcccagtggcgggatctcaggctcgtccctgaatctccctctgtgagggcccatggagccgattcacgtctgacttggggcaggggctggtgagtgttagactcctgctgttgcggtcccgtcggcaagcatctgcagaaggcccgctctgggtgtcttggtgcaccagaccaacaaggccccaccctcatgcgcttagacctgggcctgctctggcggaggtccctgtccttgctgatctttgagacttctgcctaggtgagggtggttccctccactcacagatgaggaggctgaggcctggagcgttgcagcacttacacatgggagcaggggttgaggctcgtttcctgtgactcgttttcatacccatcccgacacaccaggattgggttgagtcatagattgaatcagttattggtcatttattgtgaagggctgggtggcgtttgtttagttgagaatcttggaaaaccctggaggtgcaggtgagcctctctggaggcaacgaggagggatggggctggaggggtgggtgtgcagaggggatgaatccagaggggccccagacgcacatccttcctggtcagtggctggggtgatgctgctgggggcagacacagagtggcctgtgggcagggctggcaggtgccaaggcctgagagtctgctggggagcatgtggtgctggcagccagggtggacggcaggacagggcagtgcaggagaggggacgtggcctccagtgccaggcggggcttgggctgctttactgaggtgtaatttgcacacagtgaaacccagcctttcgagatagagttctctggattctgacagatgcacatatttcataactgtcatcacagtcaaggcatagaaggtttttgtcacccccaagacctcccctatggtttttgcagcccctctgggactctccccaggcctggctgttcctgctgtatccgccatccctgcagcatctcttgattcttgggactctcctttctatgatccccacagcagagcctgtaggatccccagcccatgtggctgaggacacggggttcccgctccaccctgaaccactggttcctcatgctggggtggggttcagcctcagttccccgggggagggttgatggcgtctggaaacctgctttggttgctgcttgtgctgcctgctggacactgtcctgagagcagctttgtgaggtcagcacgtgtcactgttgtccctgctgcggcatgcgccgatagctgagcataggcacagggcaggggtccaggagggggtccctgggtccacgtctagccagcgcctcccttcctggctgaccacttctatcccgcagtccccttctggaagtacgggtgatgaggacaaccccacaggcccagaggccctgagccactgtgaagctgctacaccccctttggccctctccggagccctctgtgctgacctgttctggcatgagggcgagtcctcttgcttctcaccatcccttcgccacatggtctcatcttgtcacttcagccccaggtggtgggttgtgcaggagcagtctttccactttgatggatggggaaactgaggcccagagacgggggaggtggcctgccgaggctcgtgggggagctggggcttgggcccatctgttcagagcccaggctgtcccaccctgtggccctgctggctggcactttgtgggccttattgtccccgtggagaaggagggtgagctgtgggggccttgcaggcctggctctgcacggcctccctgcatggccttgggggtgagtattggtgagtaagggccggcgtttatttggtaccttgtacgtgtagcacacacaggttctcatgaaatccacggttaccctgtaaaggaagttctttttctccttttcctctgttttccagatgagggaactgagacataaaggagctcagctctacctcgcaggaggtggtagagccaagaggagccccgagcccaccctctgggccctgcactgccacctcacttctgaggaatgcagggtctcagtcttggctttaaaccaggggtcagcaaagtacagcccactggtgaaatcccactcacagcctgtgtttgtaaataaagttttattggaacacagccaggcccattcatctgtggctgtgaagtagttgagacagagagtatatggcctgaaaaactgaaatgtttttcatctggctccttacagaaatgtttgctgatccctgttttaaactttatttctgcattgcaggatgtccttgataaagctgtctttaacattaagaaggactatcattttatgcagttgcccactgctttttggttgttttcagaaaagcaaaggagaaataatgacttattttgcaaactttttttttttttaacttttttagagacaaagtgttgctctgtagcccaggctggaatccagcagtacagtcatagctcactgagccttgacctcctgggctccaagcatggttgaggaatagctgggaccacaggcacacaccaccatgcccggctaattttaagatattttaaatttttttgtagagatggcagtctcactgtgttgcccaggctggtcttgaactcctgggctcaagcgatcctcttgccttggcttcccaaagggctgggattatagtcatgagccactacacctggcccacttgctcacttctaaaataaggttttaaatttttcattaagaagttgtatactaagcacatcatgaatgtataacacagctgttacgcatgtggacacctgtgtagccttcacctagagggaggtagaggatgcattcagccttccaggtttcctcaggagacctgtctcccacagcaccgtgtctgatttctgtctgccaagactgttcttgagctttatatatgtggagtcacacgcgtggtcttttgtgtctggcttcttttgctcaccatcaccatcaggtcagcaaggttgaccgtgctgttgcataaagcagttgttcatttattttgagaaagtctcactgttgcccaggctggagtgcgttgacatgttctcggctcactgtagcctctgcctcccgggcttaagcaatcctcctgccacagcctcccaagtagcagggatgacacgcatgtgccaccacgcctagctaattttttgttattttatttatttatttttttagagctggggttttgccatgtcacccacgatggtcttgaactcctggactcaagcgatccaccgactttagcctctcaaagcactggggttacaggattttgccactgcacccgattttatatatttatttaattattgtttcttatttatttatttatgagacggagtctcgctgtgttgcccaggctggagtgcagtggcaccacctcggctcactgcaacttctgcctcccaggttcaagcaattctcctgccttagcctcccgagtagctgggattacaggtacttgccaccacgcctggctaatttttgtatttttagtagagatggggtttcaccatattggccaggctggtctcgaacttctgacctcgtgatccgcccgccttggcctcccaaagtgctgggattacaggtgtgagccaccgcgcccagcctgttttttgttttttcttgaaatggagtttcgctcttgttgcccaagctggagtgcagtggtgctatcttggctcactgcaacctctgcctcccaagatcaagcgattctcctgcctcagcctcctgagtagctgggattacaggcgcatgccacaatgcctggctaattttttgtatttttagtagagatggtgtttcaccatgttggccaggctggtctcaaactcctgaccttgtgatctgcccgccttggcctctcaaaatggtaagattataggtgggagccaccatgcccggccttatttatttatttttaaatggagtctcactctgtctcccaggctggagtacagtggcgtgctcttggctcactatcacctctgcctccctgatccacgggatcctcccacctcagcctcctgagtagctgggattacaggtgtgcaccgccacacctggccagttgttttgtgtttttagtagaaacaggtttcatcatgttggccaggctggtctcgaacccctgacctcgggtggtccacctgcctcagcctcccatagtgccgggattataggcgtgagccaccacacctggcctcatttctcttttatttcagtgtatgtggtagtcccgctgtgtgagcgtgccatagttgatgtatgcatttcactgtgcgtgggtattcgcactatttcctgcttcacaatctttttagctgcgataccaaagtccagagagctctggaaacgaaagtgtttcatgatccgttcggcacaaagtctgacccagactgaagtgaggtcgttcacatggtgtctgttggtcccacagtagtgtggctgttggcacgactctgcccagcgcgttctcttatgtgttgtatgtgcgttattttcctggtctgaactcaggaaaattctgaattccaaaacacaagggccccaggagttgtggacctgggactgcctcttggcttggggtgtgatcaggcatagcaatggcttacctgctttcctttctttcgtgtaaataccttgagggccggttaaagactaatctctgattacactgtaaatactgttaacacacctttgaaaggccttgccagagctaggtccagctgcctcagagggtgaggagatatgaatggccctggcatctttcctggcagatttctccttggttcagacggagcttagctgtgatagctgactcttcccctaggagccctgggtgggtttctgtggctctgtgaaggccctggaatcccctgcagaatcaaagttgtgcctttttttgaggtcagtgaccaagacaccccctgcagagccttaagggggccatgactcctcaagcccaggacttgagcctgagctagggagagcctcagagaccttggtccccccgcccccactattaatttcaacttgttgaaagggagtttgttttcgtattataaaatacaaacataccaaagggtgcagattgaacgataatgttccctccgccctgtccttttgctcctggtggtgtggaacctgggtgcccctcccaagagagcccgggcctacacaggcccttgcgtggatctcttcccttcttgcagaggtgataaactactgctccaggctgttagtaccagcgtgaggttttacagtcagaaatacacatttcaaactagtactaagacccccttcattgtgatttaactaatgtggttttcttggccatgttactttagattttagttgtaaagaaatagacagggctccaggatgccaggcgatgcccatggcggctgtggtgcctgtagctgccatttcctcttttatttggattgagatggagctcctacactgtgcagcccccttcatatcgcacagttcagtggccttcggcccattcacagtgctgggcgaccacctctgtccagctccagaacgtcttcattgccccagaaggaaaacccatagccttcaggtggtccctctccatccctccctccacccctggcaacccacaatccactccgtctctctggatttgcccattctggatgattcacgtcgatggaaccgtaggctgtgtggcgttctgtgctggcgtctgtcgctgagcgcagtacctccgcggctggtccccgtcacagcgtgggtctgtgttcattcctttgcatggccgtgtcgtattctgtggggacagatgtgtgtccacccactggcgacaggtgggttgtgggccttgcgcccagtcggccgccccagagcccgcgtcgcaggcagtctctggcccgccttgtgcccggcgtgctgaccgggcatccccgtgcccgctcgcaggccatgacgctgatggagtacctcatcaagaccggctcggagcgcgtgtcgcagcagtgcaaggagaacatgtacgccgtgcagacgctgaaggacttccagtacgtggaccgcgacggcaaggaccagggcgtgaacgtgcgtgagaaagctaagcagctggtggccctgctgcgcgacgaggaccggctgcgggaagagcgggcgcacgcgctcaagaccaaggaaaagctggcacagaccgccacgggtgagtccctccctgcggcccctgacggcctagagtctgtcctccgcctactgcggctcccggcacccggccgcccactgctttctctcccagccaggagggaccgcggcatccccctttgcttctcctcacctgggccccttgctctggtctcacttgggccctttttttcccttagcacctcccatgcagcagctctgggacccttcctgcctcttgcctcgtgccccagggcaggcctagaattgggaacttttattccgctcccccataggctcagggcctgagggtgatcagtgctggggacagggctctgaggggacacgcacagtgacccccgagggtgctgtccttctctctgcgctgagatgaggggaacatcggagaggcagaggggggcctggaagaggcacagaaggaaggccagagccagggcctgcaggttgcaccaggcatctgggcctgtgttaggagccttgacagtgccttctggaggtggaggactcagtctggtgggtggtgaccagcaccgaaaacaaaacttgaaatagtgcatcccacatcgtcaagccaagatctgtcccacgaaacatttccagttatgtgatgggtgtgtgggtctcggactgttccaggaagtgtggtctgtgttggtcgggggctcacagccgtgaagaggctagtccggctgctcaggactgggagggaggctggagaatgtctgccaggctcttctgctctccaggaagagtggaggtgcctcagttagtggggatacgtgggatggggaggggctgctagagcactgccctggaggtggaggtgggtcagccaggccggtgcagacaggaggaagggcctgtggccctcgtggggtccggctcgagggactggacttgtttggggaagtctaggccttctgtttggacgggtctcatttgggatcacctttcagcacccacggggagacatgggtgtgacggggtgtgtgcgaccctgcctgggactccagagtagggacccacgagccagtagatgggcgtgaacgcagagagagagtgaagtggagggaaggaagccggtgtggcgtgggagtgctcagagccagggacaacaggagggagtgtaggcggcagagaggggctggtcagctcgaggcaggcaggcaggcaggtgggtggcggggttggggtggacggaggagggacattggcagtagctcggaggagagtgggagcctcaggtaagaggcctgagggtgggacatcctggctcgggggtcgtcagactttgtgcaaggccagagctaatgtcctctgcgttgctggccacgccttcccatcctagctgcctggccccgtccgctggcggttgctgggaagcagctgcacccctccgacactcaccaaggtctccgaaatttgaattttatgtagttttcacgtgtcttttttaagacttttaagttgttatttaattttttaagggtactctgaattttcgcccatcttggtgcattcttttcatttcttccaaccattgaaaaatgtaaaggcctttcttagaccttctcaggccagctgtggctgccactgtggtgtgctggcccctgtcttggagtgagttgtgtggagggctgtggctggggaggaggatgggggcagctagggagtgagccctgagaccctcagtgggcagggaagggcctgtggtccccgggcagcaccgaggctgggtgctctggtgatgggaaggcccgggtgttgctggctgggtgccagtattacctgtgatgtgggaggtggggccctcagggctgctgggcattggatttagccaccaccaggctggggggttaggggcatgtgcaaggtagaggttgggcaatggggtgtagattcccagcactcacctctgagagtccctagagcttaggaggaagtcacaggggcagggaagagcaggaggggccacaggggtgtggtcctccctgtgcgctggcctcacctgtgccccacgctgcccttccatctgcccatcccctcagaaggccgcttacccacccaagtccgtcaatccctgctggttctctcgtcctttcctcactcataaccccagatggtcacccttcggccccgctctgccacccacatgctccctggagcatcccatgcacccagccctgctgggcacaccacacgggggccagcctgggggcccctggacccggtgcaggtggggccgccagacagctgcctgctgcggctccgggcaaggggagccagggcctgctcgtcagggagaggcctgggcctggggagtgggttgggtggggacacaagtacaggacacaggtgcaaggcggcgtcttggagctggagcagacagaacttgctgaccagtgcacagtggttgggagggcggggcaggagaggcagggtccgccctggggctttggaggctggggcaatggccctgtgctcggcgggcctagggcctggttggagcctgtcctctgcactgtggaggggggcaagggtccacaggccttgggggtggagagaacagtgtcaggacagagtttgagggtaggcggggttgctgagaggatgctgcagtggaggccggggatatctcagcagcctcctggagggtccggccctgccttcctgtgtcctctctctcccttcccctcctgctcttggaaccaagggctcctcgctagcccactccctaaccccgactaggccttggatcccgctgtctcaatggatgctgttctcccctctgaattccagttgttccctgccagagctaccattctcaacaagccctggaaacaggcctgggaaacctgggaggaaggacctcccatcccccaggggcccagggacagaccccaggcacgcggagagtcctggtggtggcagggctcagaggttgctggggttccccacctgcttatcagactgacttttgctctggtccttccctgatgcctggcccctcccgtgggtggggctgcctgcatccccacccttcctcctctgagcacctggcgtctggtctccgcctctcagtcctagtcttggcctgcagaggttgtagggtgggggacttggggggtggggttggacacagaagcccccgtctgtctaggctatggggtttcctgtctctcgttccctggtctgggtctcacgcgtttctcacccgccctccagcctcatcagcagctgtgggctcaggcccccctcccgaggcggagcaggcgtggccgcagagcagcggggaggaggagctgcagctccagctggccctggccatgagcaaggaggaggccgaccaggtactgggcgtgcagctggggctgtctgtccgccacccgcctccacgcctcacttcaggctccctcccagccaggcgtgggcctggccctcactgtcgctgctccacatgctgtcactcgtctcctccccagtcctgcctcatcctcaccccgccgtccctctgcgtgtcactctctgcctgtccctcactggttcagggacccccagccctctctttcttcggctctatctgaccctggctctgcctctgactctgcctctggcccctcccgtcatgcccctcacactctctctcccccagcccccgtcctgcggccccgaggacgacgcccagctccagctggcccttagtttgagccgagaagagcatgataaggtcagagcagcctccctgtccctgcccctgccaggggctcccctcagaccagccccgtcgccccttcctaagtcaccccccaccatcctgctgggcccgaagcccacaggctcacgcgtgttgaaacctcagtaccttcagccgtaggatgtaggaccacaagtcagacagagcctgggtggtggccagcacagctgtgccaaggttgctcgggtgaccagggtcccttcctccccccaacgcaggagataccaccgaggcgggtgcccgtcctccccgggtgcgccagcacagcaccccactccccttatcccctgtcccgcctgacctttgacccaggtgccccatccccatttcatacattgtccgcatcccatcgaatccttcagccgctttcgttggggtgggaggggttgctggggcttccaggctgaggtggcatctgcccgtggctcacgttctcatgtctccctggtcgtgcccgtgccccaacaggaggagcggatccgtcgcggggatgacctgcggctgcagatggcaatcgaggagagcaagagggagactgggggcaaggaggaggtgagcggggcttgttctgccctccctggcccctgcaggtgtccgtccgtcccatcgctcattcctgcgtggccaggtccctggagcagagactgaaacacaaggtcctggagctgggcaccgggtttccaggcttggtcggcctctctgtgcctctccctccctgctgggctgaggccggtgactgaccaggctgccctgcggccacctcctgtggtcagcgctggccatcccccttcgggctgagcaccgtgagggccaccaccggccgccacagctgaatggggaggcccagaataggccaacagcctggcatggccacagggaggagggtgcagggctcgccccatctgtcacactttgtcgggcacctccttggtgccaggccgtgtgctgcacacccagggcctgttggtgagcgaggaggcatggtcccgccctcgcgaacactgtttctgtggcgtccccatgctctgcagctgagtagcaaaccctcccacaaccttgtgcttccaggtcacgcttcagtacttccctgtgacgggcccgctggctggttgtttcgtgtcatggctgaggtcactcatgcctctgggcccggggtgtccgcactggccttgccctccagcctcctcccctggcctctccctggttactagtctgtcctgagtgtcctcatagcacagtagctgctgctgctgccgccccccaggacaagctcgtcgggctgggttggagttgcctcgtcagcctgtgcactgctattggtctcagcaggtcctgaggccagcccaagtttgaggggtggggacaaggcctcctctccatgggaggcggcagacagcttgtggccataagtgatcaggcacagtgggactttcttggtagacggaaagcctctttaggttggcctcggccagggggtctctatcagtgtccaccacagcccagtgacccgagtaagggctgccctgctgggggagcaccagatctcacccatctcttctcctgccctgccctggactcagctcttctccccttcccatccccgccggggcctttgcctcacgggtgctgactggagatgtgtgcatgagtatgttgggggcatctgcacgttctgagacgggctctggttagctgggcccgtcgtgtgcccacttccagaacacaggaccatgcatgcgtgtgcgtgcggcatgggaagacctgcagtgcgatgactgcggggtgacagtggggcaatgggcgtgggaaggcctgcagcgcgatgactgcggggtgacggcggggcaacgtagggggcatcgtgaggggtgctcaggttgacctgagtgggttcatggggggcttcccaggggaaggcatggagcaggggctggccagtctggctggagaaggcacggtgggcagagggaggatcgagctgcttcgggtcgagcgaggggagggcttggcctccatcctcagtcagggccgggcaaggacctgggagcaggtggagttaaggggctgccctgctgcagtgtggagaatggatgtggggcaggagtggggctgtgttggggctccctggtggtaccctcgggtggggtaggtgggcaggggtgggccgaccccatgacggatgaggagggaggccaggtggtgtgtttggggcctgcctccctctcaccccttatggatggctgctgtctggacacccagggcctggccgcctcccccgccacgggccccagcttggtccctgtcccaggcttcccaccacttcttcatgctccttctcttctctctcccccacagtcgtccctcatggaccttgctgacgtcttcacggccccagctcctgccccgaccacagacccctgggggggcccagcacccatggctgctgccgtccccacggctgcccccacctcggacccctggggcggcccccctgtccctccagctgctgatccctggggaggtccagcccccacgccggcctctggggacccctggaggcctgctgcccctgcaggaccctcagttgacccttggggtgggaccccagcccctgcagctggggaggggcccacgcctgatccatggggaagttccgatggtgagtgcgtggcccacttgcatgcagcccctacgcctgtgtgcacctgtctttggttgactgtgcccttggacagggacagatcgagccagtggcgccgggcagtggtggggcgtcctgggtgcaggggagggggcaagggcgggggtcagatgagagcccagcacagggtgtgtgagattgtgccttggaggacatggggggtgtgctgtggggaggggatggcagctcagccgaggggcagagaggctctggccaaggcagagcgtgtgtgacgtaggcatctggggagggcggtgggtggagctgggaggtgcaggtggagaaggggcctgacacccagctggacaggggaggggtggccgagccgtgggagctgagggagggctgggcaggtctggcagaggctgcggggaagcccctcaccccagctggggtcccaggggcagagcctggcagagaagcccagttggaatttgagtgtgtgtgcgggaggccgggtggggtgggtttctggggggcaggggggcttttgtgtgaacagccacagatttggaggcaatggtcctccctagccatctgggcagtcaaggttgccagcccctcatgctcttctgtcctcacccaggtggggtcccggtcagtgggccctcagcctccgatccctggacaccggccccggccttctcagatccctggggagggtcacctgccaagcccagcaccaatggcacaacaggtactggaatgggggtgggaatggagccccgggtgggagtgagtgggagaagttagtgttgagtgtcctaagggaggggtggacgcctggactggaggtgggggctgaggcggggccccagggaggggctgagcagaacatcctgaccccacagcagccgggggattcgacacggagcccgacgagttctctgactttgaccgactccgcacggcactgccgacctccgggagcagcgcaggtgagcccctgccctcccctgcccagtggcgagagggagcctcccctagctcttcgggagccccgtcccttgctgtctttgtcccactccaggcagggccggctggacttagggatgaaaagttcagttgggtagagtgggccagaaccatccacctgtctttaaaagaagtgtgcatctttattttagagaaattgcagacttagagaaaaactgagaattgttctcaaggtttcccacccgaatgttgacctctgacccgtctctgcctccacgttgcttgagtgccttgcaaactctccaggtgtctcaaagaacacggactgtcttgtcctgtgcagtgagctgcgtggacaggggtttggaaggcagccgaggctccccttccgggtcgccactcacctgctggtggctcctgggctggccagggtgcgtcctcatgggtgctgcctttagctgccctggctccttggggttttcagctggcgtaagctggcgcccatcgccggtgacgggcccatctgctgagtcctgagtggctcttcgtcaggagtgcccgaggtcatagtgggccactggtgcttcgccgcggccctcagctgatacctgtctgtcccatgatgagtcaggtcagccttgatctcttatttttattttaagtgagctgttagtgaagagcaggttgtggtacagaaacctgtttccactgatgaaaggctggcagcttgcagggagtgagctgcacccacgcttccctcctctcattatctaggttaacgtagagcaaccttccagcatgcagttttccttcttttaggcccttttttgtcccatacaaatgtgtgcattttttcaacattaggtagaattcttaaatctatttaaaaggaaaatcaggccaggcgcaatggctcacgcctgtaatcccagcactttggaagctcgaggtgggtggatcacctgaggtcgggagttcaagaccagcctgaccaccatggccaaaactccgtctctactaaaaacacaaaattattacccaggcatggtggcgcacgcctgtaatcccagctacttgggaggctgaggcaggagaatcgcttgaacccaggaggtggaggttgcagtgagctgaggttgcgccattgcgctccaactggggaaacgagcgacactccgtctcagaaaaaaaaaaaaaaaaaaaaaaaacagaaaatcagacctctagccaacagatgtcttcacgctggcccggaacacgtgtctgtgctgtctgtccacttggaagctccctctggggctgtgtactcaaggagcgtctgagggcaggctcctctgagcctggaggcacctgtgaacacgcccccgctgccttcccccgcgggcctatagaccctggacggccccaccctgaagcagttgctgccctctggttgtcagagggtgacacctgcttctgtcatccctcttgtgtttgctcactggaatcagacccaccttatgggaatctgggctgacgtgaggttttggcctgggcaagcgatgcttccgctctgcacctcagttcctccttcccgaggcctctgggcaccgggctctttgaagcgccccctatgatggcctatactgctcccgggttggagcctcactgctgtctgccctgtctgagcccctctcccggatccttccaggagagctggagctgctggcaggagaggtgccggcccgaagccctggggcgtttgacatgagtggggtcaggggatctctggctgaggctgtgggcagccccccacctgcagccacaccaactcccacgccccccacccggaagacgccggagtcattcctggggcccaatgcagccctcgtcgacctggactcgctggtgagccggccgggccccacgccgcctggagccaaggcctccaaccccttcctgccaggcggtgagtgtgggcccatcacctgctcaagtccttcctgtgggttccaccagaggaggtgcctcacggggcagggacacttcgccctttgcctgcacatgctggatggacacaggtgggctgcgccactgactccactccgtgtctctggtttactcttcctgcaggaggcccagccactggcccttccgtcaccaaccccttccagcccgcgcctcccgcgacgctcaccctgaaccagctccgtctcagtcctgtgcctcccgtccctggagcgccacccacgtacatctctccccttggcgggggccctggcctgccccccatgatgcccccgggccccccggcccccaacactaatcccttcctcctataatccagggcggaagggggcctggctccatccggctgccccattccggctccctgggagatcagtgttgtgagtgcatgtgaaatgggggatccccacccccagtgcccttccccttcctggggcccactcacactacaccctcttcctttcccaccccacctccccggagagaaactggacatggggcctggggaggggagctggccagaggaggacccctttcccgtggcattagaagggggaggggtggctggggcccccacccattccccctccctccaaactcccaacccccagtcagtgtttgagcctcctcgttcccctcacgcacccgctcacgcaccctcggtgaatccttggtgatgattttggcaactttgggaataaatggcaattcccacgggcttggcactcccagattcccatctgtgatttcgtgtgtcccccagagccccttcatccagggacccagggctcaggtcacatctctttctcgggggtggctggcaaccagcccctctgtctcagaagccctgatttccctgaccctcccaggtcaagggatggctgggttgagggtggactgtgcgaggcctggcggagctgtagcccacacaggtccaggtggtcgggaggccactcatggccagacgcttccggtgcaggaggccttgctcttgtgttgaggggacaccaggatgaggtcagagagtgcactggggttcagggaggagaagaatcctgagagatggcacatgtgcaacacaggtcaccgtcgccatcgcccgggcccaccgcaagcatcactaatccatccctgcactcctggaaagccgggtcagcctctgccggctgagctgagtggaccaccaggcgcctcctggttgtcctctgtgtgctgttttcctctgtgtgctcttgtcctgggctggaccacacctggtgagactatccgggagaatcctcgggccgccttgtgaggggggtgttgctgtcatctccagggctaggtgacagcttgttgcaggccccacagccagggcctcagggatggggatctggccatgtctgttttaagccgaacaggctgttcttccatgtggagtctccctccgtgatcccctggggtcaagtcctgacggctgggttcgctccctcagtgactccgacagctcttgtctcagaggtgctggggtgaaggctgtgtggggccaggcccctggggtcagacttcttgccccttctgcccgggggacgctctgggctcagggtggggccagacagctacatcacagggacacttgttatgggtcggggtccagggagcacccagccagtggagtgttggaggccactgagagggacatgactgcggtgtccgagcagcgtcgtggccaccctgtgtgcccactccctggtggacagacctacgtcacctggggattgcagagcaaaaggagtgctgttggggtgatgtgaggttggggttctgtttcttgctgtgaattgggtcatgacctgtgtcggagcgttctctggcctccacttgcccctgcagaccagggtgtctggagggttgtcgggggcttgatggaggaattgctgaccacaccatgcaggaagaggtgggtcccagggacacaggaactttggggtcagccggttccagattcagttgcagaggagcatcccccttgcttagccagggaggggaagccctcttctcacacccggcctgggtatgttgtgggagagtcatttcccaggaggaaatggggactgttaccgggggagggggtgctgtccccaggcagcagcaagcgtcccttacgcttgggctgtccgagaccctgctgctctaggcggttgtgatgggggagccccacagggcacagagagccagctgaaggcggcagctctgggtgggatcacatggaaaggggaggcgagccgagcctccctcttgccaatcttggtctccccacagggtcatagctcctgggcccctcacttgtcagaccctccattcaccaaattaaggataagtttcacgatttcgcactgcggagcctgcactccctttctcttcaaaaaagctgaggacgaagataaaatgatacagttggattagtccagtggaggggttaaaggtgtgaggctttaattctccccaccatttcctcatttggcaaaacagagaagacaggattgaaaaacaagacaaaaacccagaggcttgcacataaatttggggcttaactacagcatcttcggcatcttcttttccctacagtgcgaattacaaagtagcaccacagatctcgtgtctcctactttattcctctttctagaatattccagccaccaaagtgctcagcaggagctgctgtgtaggagtcccccatgaggcccaagcacctgagcttagtgacatacacggttgaacgctgggagaatgctgggagcctgctgttgtccccgattgagggctccccccactgtgtgtgtatcactctttctacagcagatgtgtctctctccccacagtgggatggcgagcttgttaaatggccgtgaggaagactttattcaggaccatcgagacaggtacaggtaccatcagtggatggaaaatcactaagagcaaacctcaggggtccgggggttttcggctaaacccacctagcaggattcttgctgaaggcaggccagggtgatcagaggtcacctggggatggtggaggctgaagaagcctatcagatgtgagggtggcgggggttgggggggatggcggcggggttcatttgctgaaaggattttacaagggcatgcacggatgggcctaggaggaggttcagatccctcaggtttggctaagcaagagtcatggtggtgctcccggctggctctcaggagcagatgtgcttctgacccgacgtcttcccccagagagggctgaagtggaaaaaaccccagaatttctccctgggacaggtgaagcgatggggcgtgggacattcctgggtctcgactctgttcagggcctaggggttgggtggggaaggcacttgagggaaccttcctggagcccgtaggagcttcatccgagctcctgggtcaccccgcccaccagagtccaggcccaccagagtcccctgccacctgtgctcaccctagccttacccctcgctctactcccgccctcgccctatcctcgctcctcgccctacgcttgcccctcgctctggagctgcgatgccagcctcagggctttcagtcctgccttgatctttttttatactgaaactcaattttacacacacaaacccactcccagccagcctctgccttttgccttttcctcatgttctcattgaataggaagaaatgcccttttttttcccccctagaaggagtcttgctctgttgccaggctggagtgcagtggcacgatctcggctcaccgcaacctccacctcccgggttcaagcgattctcctgcctcagcctctcgagtagctgggattacaggtgcccaccaccacgc[178 bp omitted]gttctagggtacctatgcacaacgcgcaggtttgttacatatatatacatgtgccatgttggtgtgctgcacgcattaactcgtcatttacattaggtatatctcctaatgccttccctcccgcctcccccaggcccttagtttgtgctgctctgcgttggttttctgcgtgtgctaaaaggggagggagagtttctgtgcccattcccaggcaccttcttgcagccgcaggcatctcccccacacgtgcttctagcttcccgggtgtggcgtgagccattgcgtccggccagaaatgttttatttcttgagaacttgtctgtctctgtgatgactgtgggttgtccagctcatccctcaagcgccatcctgccaggcccttcactgtggtgagaaaccggcctactcacatcacaggtgcccctggagtttctcaaactgcagcccaaggattggctgcttgcttttgtaaaaaaaaatgttttattagagtgcagccacggctgcttctgcactacagtggcaatggtgacattgagtgtggcagagaccgagtgtcccttgagcctaaaatatttactatctggctcttcaacaaaaagtgtgctgacccccggtgattgcttgtatgtggcaggggtctaaggcctgcctgcacgtcctgggacagcccacgcttccacagggttccagcatgctttccgccgagaaatcgctccctttgctgtttgttttgtattgaatgtttcttcatgcttttgttttactttcagggataattatataatgttatgtttcatccacattattttagtatggatatttataatttcctaaagcactattttttttttttgagacagagtcttgctctgtcgcccaggctggagtgcagtggctcgatctctgctcactgcaagctccgcctcctgtgttcacgccattctcctgcctcagcctcccaagtagctgggactacagatgcccaccaccatgcccagctaatttttttgtatttttttagtagagacggggtttcactgtgttagccaggatggtcacgatctcctgacctcgtgatctgcccacctcggccttccaaagtgttgggattacaggcttgagccactgtgcccggcccataaagcactatttaatgactgctccataaatacaaacttcctttccttattattattatttattttttttttgagatggagtcttgctctcgtcccccaggctggagtgcagtggcgcgatctcggctcactgcaacctccgcctcccgggttcaagcgattctcctgacttgggactacaggtgcgtgcgaccacagccaactcatttttctgtttttag[153 bp omitted]aaaactatagacaatattatcataaccacccctgcaaatgcctcactcgtgttcagccatcatttacatttgaaccactcctgtttcacctacagcctcctcatggcccctcccctggagcacttaaaaatggtaatgacatgctctctagtaatcgttgtgtgttactgtcaaaaggtataactcatgcattgatgggggtaacccctacagcagttaaccctgcgtgctcagaggggaatgaaaggtagctcagaggctcgggaggtgaggttgcaaaatggcttgtgttgtggggaatgttctcatccacccaaatcaagcatcactacatccatccgcaggggaggcaagcttagggcatcacgtccaggagtggccaggtcccgatgtcacggggagccgggctgggacaagctccagacggccagggtggtgtgggtttgcagtgggagggctggcgcgggggccctgagggctccctggttcccatcttatcaagatgctggactcggtgcttgaaacatgtcctgacagccacatgaaaagggttagaaatgatactgtttcgcctgggtgctgtggctcatgcttgtaatcctagcactttgggaggccgaggcgggcggatcacgaggtcaggagttcgagaccagcctggccaacatggcgaaaccccgtctctactaaaaatacaaaaattagcctagtgtggtggcgggcacctgtaatcccagctacttaggaggctgaggcaggagaatcgcttgaacccaggaggcggaggttgtagtgagccgagattgcactactgcactccagcctgggtgacagagtgagaccctgtctccaaaaaaaaaaaaaaaatgatactgtttcctgtatttttttctcttagtatcttaagaaatacatgatttgaacaaggaccttgtgtctcctctcccctttcccggactattctgaccccagcagttctcagaaggagctgacattaatgagaacttctccctgttagacccttaaaatactgagctttcgggaccctgcctggcttgttcctgtaaaacggtcttgtctgtggtaaatactaaggtttttggtctcacagccgaggaaatcaaggatgtggatgcacacagagtgagatttggagcaggagtttaataggcaaaaggaagaaacagctctgtcacagagacgggtcccgaacgggttgtgaagttgtagaagaaatgtcaggggttttatagatgggctagtgaggaggggtgtcttttcttcctagggcctgaagaaccagttaggaccaggtgtgctgtctgcatcgagcagag[136 bp omitted]gtgcctcagcctcccgcgtagtcgggattacaggtgcatgcagccatgcccggctaattttgtatttttagtagagacaaggtttcaccatgttggtcaggctggtctccaactcctgacctcaagtgatccgcctgcctcggcctcccaaagtagtgggattgcaggcgtgagccaccgcgccgggcccccaccccattctttgatcctgcaggcaggcccttcgtttgtgctgctctgcgctgctgcttatctgtgtgtgctaaaaggggagggagtgtttctgtgcccattcccaggcaccttcgtgcagctgcaggcatctcccccacgcgcttccagcttcccttagtgtgcctaaagaaagggaaaggaatgtgctttaggcccactgttttcactggggcccatctatgtatgtggcttggtgattacccaggaacctcccaagtctgtgcccgagttgcttatctgtgttttacagcctgaaagatcaggctgctctttgttaggagaagtgatttctttgaactgcgtggtgtggtgagaaagggagcaatttctaagctgctttttgttaggaagttttttgctggggactctcttcgccctatctacctaaatgatttctgtttcttacatcaattgggtattgatttcaggtagaatgggtgaatgcatttattcgttcatctaagccgcatttactcctttcttttctttcactgttgttttttttttgagacggagtcttgcactgtcacccaggctggagtgcagtggtgcgatctcggctcactgcaagctccacctcccgggttcatgccattctcctgcctcagcctcccgagtagctgggactacaggcgcccaccaccacgcccggctaagctaattttttgtattgttagtagagacggggtttcaccgtgttagccaggatggtctcaatctgaccttgtgattccgcccacctcggcctcccaaagtgctgggattacagccgtgagccaccgcacctggcctctttcagttttgatagcagattatttcctttggccctgcgtggtctctctctggctgggcagctctgggccagccataaatggaggggagggcgtgtgtgtggccacgtgtgtttctgtcctggacaacactgtccggaggggcctaagtgggaagtgccctcaaccaaggagatagctgctgtgtgtgtgtgtgttgtgtgtggttgggacagtcggggattctcacttttttttaaaatttgagatggagtttcactgtcgtcacccaggctagagtgcaatggtgtgatttcggctcactgcaacctctgcctcccgggtttaagcgattctcctgcttc[135 bp omitted]ggccccccaaagtactgggattacaggcgtgagccactgggcgcagcctgggatcctcactttttcgcagattggtcactagcagggcgtctgatggaactttctgagatgccggaaatgttctctgtgctgtacaaaagggatgccactagccacatgccacgtagaacagttgaaatgtggccagcatgagatttttttaatcttgccaatttttgatggatttaagtttaagcacctgcgtgtgagcggctaccgcgtgggctgggattggaggaagctggaaagcgctcccctgcgtttcggctgctggcccagcagagggcgccggagagcggacggagccgcaggcggggttgtgggaagacgctgggatcccgtgcgcgcttgtgctccttccttctgggccagcgcgcagactatcaaccgaggtattcagtccctcggaaacccagttcctccgtttccaggcttctcgcccacacggagacagtcgctctcacacgtacctctcgcgggctcttactcgtggtcccggtctcctcctggtccccaccttccagcccagcgcgcacactagacggcacgtgctctccacgctctttctccagcgccccttgctcacccgccccccgttggagtggcccatcctctccgcttagacacctgcagtcactgtcactagctgaactgcgccctcctgaaagctctatgttgaaaccctaccccccaccctgcaccgaccccgtaccccagaatggggctgtatttggagacagggcctttacaaggtaagtaaggttaaaatgaggacattagggtgggtcctaatccaatctgactgttatatagtggggttgcaccttcatgtgaggacgccgggagaagacagccgtctgggagccaaggagagaggccttggcggaagccaaccctgcagcaccttcatcttgaatttctggtttccagaactgtgagaaaatccattgacgttctatagcgctcccagctggcggtactttgttatgacagccctaacatgaatgcagccatccacactgtctgggggaaggcacacacaccccacagcacccttgctgtctcaccccgtatcgcaaaagctcacgcatgtgtctctcccgagtccctggagggtcctgccacctacatctctctccttggcctgccgcctgtgatgctcctgggccccctgctccagcaccgctcccttccttctgtaatacagacaacagagacaggagatggcctggccccacttcatttctgttccctgggaaataagcatcgcaagtgatccgtagaatggtagacatcatccacttcccaagcatctctggctgaatgctgttctcatccacttcccaagcatctctggctgaatgctgttctacacatgcacgtgggaggcaccagggagcccagaagaaatgaaaagcctgggcagactcgcagttctgccacacagtgaatgtgctactcaagccactcagcctgggctgcagaggttggaagcctcactggcctgaggtttctgagtaagctctgacccaatcattgactattaaacttcagaggtccatggagacctcttaggagtctttgaaggaacttagcatagataccgatagctgctgactgcagggagatggggagatatgttttgtaaacctgtccaggcaacttttttgcctacggaaacacacaaaaacgaaaacaaaccaatgaaaaaaacctctcagaacgatacagaatccagagccactacaacacatttcatgaagtggcgtgagcctgtaattccagcagtttgggaggccggggcgaatggatgacttgaggtcaggagttcgagaccagcctggccaacatgacaaaatcaccatctctactaaaaatacaaaaattagtcatgcatagtggcatgcacctgtagtcccagctactcgggatgctgagatgggagaatcgtttgagcccgggaggtggaggttgcagtgagccgagatcgcaccattgcactccagcatggacaacagagcaagaccctttcttagaaaaaagaaaagtatccccgaacattatcagagtcaagttaataaaggccaaaggtagagaaaatcttgaaagtatcgagaaaatgacatgtcaatcataaggtcaggttcttcaacagtcatactgacattgtggctggaatatttgttgttgtgggatatatatatatatatatatttagagtgttgtgggatatatatatatatttagagacaaggtcttgctctatcactaaagctgcattgcagtgtgtgatcatagctcaccatgggattcttgattttcagtgagtataaagtgtaagacaaaataagtcttagttcaggtatgctggatgggaagccagaggtctgcatagcagttacaaagaaggccttattatctggaagaaaagggaccatagaatgtccattggttggggaacaacccagctttagtttttccagattctctgcatgtgcaggtttatgagactggagaactttgatttcttcttcctcctcctcctctcttttcttcttcctcttcctcctttttctcctcctttcttcctttatttttctttcttcctttcctcctctttcttctcctttttcctcctcttttcttcctttcttctctttttcttcttcttttttttttttttttaaaagaccgtgtttcgctctgtcacccaggctggaatgcagtggcgtactgttttagaaaagtgaaagagggccgggcgtggtggctcatgtctgaaatcctagcactttgggaggctgaggcgggtggatcacctgaggttgggagttcgagaccagcctggccgacatggcaaaaccctgtctctactaaaaatacaaaaattagccgggcatgatggcagatgcctgtaatctcagctcctcagtaggctaaggcgggagaatcgcttgaacccagaggcagaggctgcagtgagccaagattgcagcattgcaggaaagagagaaaaaggagggaaggggaaggaaaaggaaagaaagaaaagaggggaagggaagggagagatttaaaaaacaatagtaaagagagatttaaaaaacaatagtaaagagagattaaaaaaaaaaagtaaatgggccaggtgcgatggcttgtgcctgtaatcccagcagtttgagaggctgaagtgggaggatcacttgaagccaggagtaccagaccagcctgggaaacatagtgag[133 bp omitted]aaaaccccatctctactaaaaataccaaaacaaaaactagcagggcatggtggcgcatgcctgaaatcccagctactcaggtggctgagacaggagaatcacttgaacccaggagacggaggctgcagtgagccgagattgtgccactgcactccagcctgggcgagcaacagagtgaggctgtctctcaaaaaaaaaaaaaaaggaacggtagtgtgcacctgtggtcccagctacacaggaggctgaggcaggagcatcacttgaacccaggagttcaaggctgcagtgagctatgatggcaccactgccctccagactgagccaaaaagcagaccctgactctaaaacaaaagaaagaacaaataacaaatgaaaataaatacccaaaaaccagtcaaatgtgaaactggtgtcaggggtatgttctccatgttgagccccttctgtggaatatgacagtgtctctatttcgggtaaaggaaagaccaaaataactttccaagatgaaaagctaagagtgctgatctcatcacagacatagccagctcttcagttcagaccacctggaaaccctccccatgtcttttcagaacaatgtcctaagaaccataggggaagtggccataaaaaccatctttcctttgcagactggggtggggactctggccaatgccattctgttcttccataatatctttcccatcttgactgagcatcaaatgaggcccacacacaagattctcacccacatggccgtggcaaactccttggttcttctttccactggaatcccccacacaatggtgtcttttgtcctatggaaacccttgtccagtcttgagtgtaaactcgtgtttacaggtcttaaagtcctgacctggtgatccgcccgcgtggacctcccaaagtgctggaattacaggcgtgagccaccactcctggcctatgccagcattctttaaagttgtgggaaaaggccaaaagcaaatagaaaattgggcaaaaaagttcataattgcttaaacatatggaaaacctggaagtaaaattaagcaagtaagtgcgagcactctacattgaagattatagaaaattcagcctcccaaatatccaaagaatccaggagtgtgccaagagatccaagagtaggtccacaatttctcattctcaggagaatctgagattatatttcaatctaatgataactgattatataatccaatttctgcatcatcttgcttttatgttttgtaataaaaattttagaccaggccaataaggcatcagcaatttaccgtagggaactagggaatgtttaattatgacaatgaagtgtttaatattgtgttttgaaatataaacagtgtagatatatttgaataatactgaatttttagaaaaatctattggggtgtcatatataaaaggataagtagagatttggaaatgcttttttattggacaagaaaattgatcaaatcgaaatctggacaaactagaaagtctggatgctagcaatacaatctatagacacattctagcatcacttctgtgtcagaagtatccggattgtggtgcctacaaatgcatgctcctacacaccaagacatccattaagaaaataaagccatgctttccagagcgtttagcacttgtttaacgtacttgtgcttctaaatatcacaaggcaggatgggatttctaaagacaaggggatataggaccgaggcaaagacaatcagcatgtacactgaatcacactccataatcatattgctagaacacttagggagtacctctgaaatcacagccctgctgccatgatgtgcaattacaggatagaggtgccaggtgaaggtcccactgtggccaaggaaagcctttgtgagacgactacttcagggtgttccccatcagaggagcacacccctgatcttgtattcctcgtcaatccaaggtccatgtgaaatggtcagatggggaattttttcttccacagacatcaggatcttctgagtttcttcatcaaagccagatttgtgcagcctgggaaaatagaaataaagtttttttttttgtttttcatttttacacagtattgcctctctacattctgatgtctacctctcctctcctctttattctttcctagaaatcactgggagaattgtactgaatttgaaaaacaagcatgaatctttcctataggataggaagcctctgatttataccataaagtgaaatttcatatacaggatgtatcaattaagatttaattcaaaaaagatgaatttaagttaaaaagaaaaacacaggataacttccattcatctgatgttcatatgccctggcacatctattgcttcttataatgtgcttgcttaaaaaaaaaaaacatgagcttttctcagagacactaatataatgaattcatgtacccatcaccaacttctacaattaccaatattcagcctcttccatttacaacctgcccattttctaagaaataattaaagcacatgctacacccataaatatgtcaaacgttcttgtctgttttcgctattttcagttcctttcgtgtcattgtcccctgaacccacctcaacaaagctggtttttgtagtcaccaataacatcaatttgttaaatacattctatcctacttacccagttagcattgaatacagttaattacactttcttgtttattttttcccttagcttactggacacgacttcctcctggcttctactccctcaacagctatcgttcttgctttatacgttgaatctctgtctctttataacttctaaatgttctcagcatcaggaaaatataaaaaataagttcacaaataattggtaagactggaacataggccttcctgaaagaatataactaacatttgcaattctcttctcccctctcccgtgtccttccttcttgccaggtgttcatagttatatgcctttttatctccaattataaaaagaagttgaggaggattagcaggtcacaaaatttcgtagacatttagacacaggagaagtaggagtttatcttaaatcttcagaggtagggaagatggctaagtttcctttcagctacagcgacactatgagaaagttacccagaaataactgctctgaatgcttgctactgtggagatgacatgttttgggtgtggggatggtggttgaagagaagggagacattattattattattttataatgcaggccttaagtacctggcctgtccctatggggactgggtctctgtctcctctctgaattcatttttccctttctctgctatacagctccccgggactcccttctggccctgcagggtacaaggcctggccccatctcagggcctttatgttttgctgtgcccccttcacttggggtcctccctagacattcgtgatatggtttgaatctgtgtccccacccaaatctcatatttaattgtaatccccaatgttggaggtggggcctggtgggaggtgactggatcatgggggtggatccttcgtgaatggttgagcaccatccctttggtgctgttctcatgatagagttctcacgagatctggttgtttaaaagtgtgtggcatcccccctgcttcctttcctcctgctcccgccaccaaagacgtgcctatttctgcttcacattccgccatgattcaaagtttcctgtggctacctcagaagcagaagctgctatgcttcttgtacagcctgcagatgcataagccaattaaacctctttcctttataagttaccagtctctgccaggcatggtggctcacgcttgtaatcccagctctttgagaggctgaggcaggtggatcacctgaggtcaggagttcgagactagcctggccaacatggtgaaaccccgtctctactaaaaatagaaaaattagctgagcatggtggtgagtgcctgtaatcccagctacttgggaggctgaggcatgagaattccttgagcccgggaggcaggggttgaagtgagctgagactgtgccactgcactccagcctggatgacagagcaagactctgcctcaaaaaaacaaaacaaaacaaaacaaaaaaaaaaccttaaacaacatattgtgaacttttcttagagacactagcataatgaattcatgtactcatcaccaacttgaacaattatcaatattcagcctcttccatttataccccgcccatttgttttttaaaaaataaaaaaataacttttaaaaattaaaaaaataaaatcagaaggaaaaattaacataaaaaattcatcctacagatttcaaataggtacaactctaaaggcaaacctaattttcagaacaacgttaactgctgccatttggcgaatgtatttctgaatcaagaccttagcccattccagaagcccttctgaagtctgagctggcgttgcatatttatgggcaacgtaagtagaagatgttttatagagcagtggttctcacctggtgcaactgtgtctccgagggacttctgacaatttctggagctctttttgattgtcacaactgagggaagtgctactggcaactcatgagaaaggccgagaatgttgcttgacatcttacaatgtcaatggtttttatattttatagtgtcaacaggggcccaaggacaggcccccaccacaaacaaccctccagcctggcatccatcatgtcgcggttgagcaaatggccaatgaactaagctcgttctgaagtcactcaccccaaaggaaacagtgtccactcaccccagcatctgcagggcacagtccgggtggctcaatgcctcacacagcaccaccactgcatcagcatccaaggcaatccagtcgaggttcaggctcctcagtgttttgcaggcgatgagtgctgcggcgatgtcgtcgcagcaggcacgggtgatcggacacgtttgcagcctgcaaaagggaaacacaccagagaatccactctagctttgggtaggctggaaggcacgccattgttacttgctaattacacacctcccggcaggacgctctgctgtctagacccgggcttctcagccaggacgattgtgctcctgggggacgtatgtctagtgacctttatcccaactgaaggtgctgctggcaacttgaggatagtgtccaggggcgctgctaaagaccctatcatgcacaggatggcccccaaggcaaataactctccagtttcaaacagcaagagtaccaagactgagcaaaccctggggcagcattttacatatcagatcgtcccagagggacttgcttttaaacctgcctcccttccattctattgaccctccagcaattcctattcttgaaatagataaattttcctacgatggtgatcagtagatactcacccgagacactctaatttacagtgaggatgctgcaaagctgcacataactgtctgacaccagtgtctcctatttcattatgcccaagtttcagggtcttcagtttcccattgcaaataagaacagcagcaatgtccttacaggaatcggaagtaaggaaacagcccatcaacctggggaggtggaagacacacaaatacgtacacttatgaggtcaatcataacagcccaccttattttcatttattcatatgacgcaagaaatacccaagtaaatctgagatgatgaggagggtggggaggggaaggaggagagaagaatgagggaggagagaagagcagaggacgggagggtgggagaatgagggaggagggaagaaggggagaaagaggagggagaggagtgggaggggaagaagaggggaggaagaggagtgggaggggaaggagggggaggaggaggaggggggaggaggaggaggggggaggagatggaggaggggggaggagaagggggaggcggaaagggagggggaaggggaggaagagaggaggagggaagacaaagaaggtggaagcagcaatgacttcccagttcctccaccttccctactctgctccaacactttggggtccctgcacttcttctctcctgcctggctctcttttctctgtggcctctcctcattattctccctggttgaaatgctcctgccccaattatcagcatagctacctcctccccaccttcaaatccctgtgcaaatgtcacctttttggtgagccctcccctgactattttgtatatcatgtgtccaatccctctccaggccccaagctggtgattccttacagtacttattactccctaatacagatagacagaaaaatggtagatagaggacagaggataggggacagatgaatagttaatagatgataaatgacagatgacatatagatacatgatacacatagatgtgtggataggcacgtgtctacccacactcacacatatatatgtatgtgtctgatgtatgtacttgtgtgttggtggctctcaggcaggcaagatttttgcccaccagaggacactggtagtgtctggagacatttttggtctaccacgccaggagagaaagtgcccctggcaccttctctccctcctcccctcctcctcctctccctcctcccctctccctcttactcccctcctcctcctctcccctctccctccccacctctcccctctccctccccacctctcccctctccctccccctccccacctcttcccccctcctccccacctcttcccccctcctccccacctcttcccccctcctccccacctcttcccccctcctccccccttcccctcgtcccttacctctttcatcctctcttccgctcctgccccgacttccatcccctcttcccctctcctcccccatcctcccctctcctccctcgttcttctctgctcatctagtggctgagaaccagggaagctgctcaacaccctaggaagcatgggacagcagccccaacaacacagaatgaattgggctaaaatgcccccatgtcaatactgagaatctaggatgcagacacatccttgcagcctcacacatgcatgtgtgtgtatctgacactccatcagatggaagtccatgggaacagggatgttagaatgctctattgaccaacttatccacctagaagcatcttcagttcctagcagagggaatgaatgagtctcacgctctgactgtcatttatcaagagtgtatgacaagccaggcattgatcatagtccttcatgtgtgtgattccaactggccatctcgattctttaaggaggaggctctagctatcctctcattacctggggagaggtgagtcacctgcatgcattgatcatagtccttcatgtgtgtgattccaactggccatctcgattctttaaggaggctctagctatcctctcattacctggggagaggtgagtcacctgcacaagctcaggcagtcagggccactcgggactccatccaggcctttctagggctggagacccaactcctgagtcccctgctgtgtccttacaactccttcccactgaaggttcccagaaccaggtggggtaaatgtatagcctcatctggatttttttttttcagaagacaccattctcttcttgtctcagtctatttgggctggtataacaaaatgccatagactgaaacgggtcccttatagacaacagaaatgtatttctcacagttctggagccgggaagtccaagatcaagatgccaacaaattcagtgtctggcgagggccacgttctgctttggaagtggcattttctcacggcgtccacagatggtggaaggggcagaagagtctctggggcctcttttataggtgtgggagactccaccctcataacctcatcacctcccagaggatccacctcctagtaccatcagcctgggggtgaggacccaacatacgaattttgggaggacatatacattcagatgctagcatatccctttcctatgtctttcctagagccacagtatccaaaaaaagaaaccctgacattgaagcaaatcatggccggtcctaccacagctcccgtatgctgcagcctgggtgcttcagcgctgcacacagagatgccactccattatcttccagggcatttgagcccagatcgaggagggacagggacttactgcacaagaggacttcggaaatggagtcacaggagacagaggtgagacagcagtacatcaacctgcaaagaaacacaccgtctcccagcctgctgaacagcagtacatcattctgcagagaaacacaccatctcccagcccactgaagcttcctatggtaatattaccatattttctttgtcccaggcaaaacctttccagatgttccttgaactctgctgtcactcaagaaaataaggagctgggtgcggtgcctcacgcctgtcatcccagcactttgggaggctgaggcgggcggatcacctgagataaggagtttgagaccagcatgacccacatggtgaactcctgtctctactaaaaatacaaaattagccaggcatggtgacgcacacctgtaatcccagctactcgggaggctgaggcaggagaatcgcttgaacccaggaggcggaggttgctgtgagctgagatcgtgccactgcacttcagcctgggcaacaagagcgaaactccgtctcaaaaaaaagaaaaggggattaaaacttgtaacacctacagatgtacagaaagatgaatgtggaatacagtgtcccaacaaacaatctcagattccagttccaagtcacatcatcaccagctggaagacctagggcaaaagtcacccattctttgcaacagagtatacatatggcttaacggaatgtactggacgatatcccatgtagaataatttttgttttgttgtttaatacacatatttaaggttttgttaaaagaatagattttaagtgctctagtcacaaaaaaataaaatgcttcaatgatgtcagatgatgagtatgttagtttccttgacgacagtcaacattttactatggatatgtatgtcaaatactttttgttttaaaaattatttaatcacaatgtaccgtatacttcgctgagagttgattttaaatgttctcacatcctccaaaatgataactctgttaattagcttgattatagtaatcattttacagtgtatgcatatatcagaacatcacactgtatggcttaaatatatgcaatttttaaatttaaaaattttctttttttttttttttttttgagatggaatcttgctctgtctcccaggctggagtgcagtggcacaatctcggctcactgcaacctccacctcctgggttcaagggattctcctgcctcagcctcccgagtagctgggagtatgggcatgcgccaccacacccagctaatttttgtatttttagtacagatggagtttccccatgttggccaggctggtctcaaactcctgagctcaggtgatcctcccgcctcagcttctcaaagtgctgggattacaggcatgagccaccacgcccagccagctccattttactgatgagcaactgaggcgtgggaaaggaactcaggtctagctacggattccgcattctgctgcacccctcagtgagcaccgcgttgctttgataatgggtggatccaggtgcacgcttcagaaatctccgaacgtgcttcccgcagaccaacttacatcagcctctccagggcacagtgtgagtgcttcagggcttcacacagcaacgtcattccttcgtccctcaagggattttctaccaaggagaggtgtttcagcttgctgttgcaggccaggacggaggcgatgtcttcacaaacttcactggagatgtcacactttcccagtctacatgtgaaacacacaccatgagacggaccaaagctttcaatcgctcatgaaacattatccacagaccaaacgacacctctgattctagtcttgcacctgccgatccattatctacactacagactctttttcttttttttttttttttttgagaaggaatctcactctgttgcccaggcaggagtgcagtggtgcgatctcggctcaccgcaacctccacctcccgggttcaaatgattctcctgcctcagtctcccaagtagctgggattacaggcgcccgccatcacgcccagttcatttgtatttttagtagagatgggggtttcaccatgttggccaggctggtctcgaactcctgacctcaagagatctgcccacctcggcctcccaaagtgctgggattacatggatgagccaccgcgcccggccacattacaaacttttaagaagtgcaaacgtaatgacatgactccctcattaatcccgtaggtttgcactgaagttaggaaaaatgtcaaagcccacgcttctcaccacctggggtgatttgccctaatggagacatgtggaaatgtctgcatatattattggctgtcacgatggaggcagccaggaatgctgctcaacgtcctttagtgaacaggacagaccctgccacaaagaagtatccagaactcgataaatctgactctctgtcaatagcactacaagaaataggaaaacccaaactgtgttttttttcctactttcacacactcagcgcaacacgcttctgtggccggagacgggagggcagctcttttgcagccactaagtaggtgtcctaaaacttaacccaatcctgacacttcccagaggagctagacacagagttgatcgattatgcctgtgtgatgaaacctccataaaaatcctacaagaatgtggttcagagagcgtccaggttggcaaacacatccacacgccacgccccagctccacagggacagatgctcctgcactcgtgtggggaaaagaatgagagatcagattgttactgtgtctgtgtagaaaaggaagacataagaaactccactttgatctgtactaagaaaaactgttctgttttgagatgctgataatccataactttagcctcaaccctgtgctcacagaaacacgtggtttaatggatttagggctgtgcagcatgtgccttgttaaccatatgtttgcaggcagtatacttggtaaaagtcatggccatcctccagtctcgattaaccagggacacaatgcactgcggaaagccgcagggacctctgcccgagaaagcctgggtattgtccaaggtttcccccactgagacagcctgagatatggcctcatgggaaaggaaagactttaccatcccccaacccgacacccgtaaagggtctgtgctgaggaggaggagtgaaagagggaggcctctttgcagttgagataagaggaaggcttctgtctcctgctggtccctgggaatggaatgtctaggtgtaaagctgaccattcccattcattccattctgagataggagaaaattgccctgtggctggaggcgagatatgctggcagcaatactgctctgtgactctttgctacactgagatgtttggatgaagagaaacataaatctagcctacgtgcacatacgggcacagtacctttccttgaacttattcatgatacagattccttcgctcacatgtttctctgctgaccctctccccacctgttgcccagccacattcccctcgccaagatagtaaaaatagtgatcaataaatactgagggaactcagagaccagcgccagtgcgggtcctcgcacgttaagcgtctgtcccctgggcccactgttctttctctatactttgtctctgtgtcttgtttcttttctgagtctctcatctccacctgactagaaatacccacaggtgtggaggggctggcccccttcacactcaggacccttccagatctcatcctgtgtgtctatctggctgcacatctgtatttttcagatcatttattaaattgagagtcagatcccagctgcacatctgtatctttcagatcatttattaaattaggtgagagtcagatcccacacggtaggagctcagtcccacaagatcacccttgacttcagatgccagttgcaagcgctgggttgctctgcctgtgtttgaccaaccggctatacatgggggttcccctgaccccttccttgggttagactgatttgctagagtggatcacagacctcaggaaaacaattacatttcataaatgattgcttgagctcaggaggcagaggctgcagtgagctgagatcccacctc[134 bp omitted]cggcctcccagagtgctgggatgacaggtgtgatccgccatgcccggcccggcccctggccaccttcagatctgtcttctccatcccgctcaaagggcaatgcatatgcaagtgtttatgcatggattgtttgctctccattgtgataattttttaaaagctcctcagtcttttgactttttattaattattgcatgcctgtatctaattatcttctgtgccgcatagaaagctcctcattcttcaagcctctcgattgaaactatgatggggatctctcctgtcagaccaagaggaaatgggagagaagatgtagcagaagccatatttaaagatagagatcatggtaaaatgttctcagaagcctgtgcaaatgttcatccacaaatgcaggaagctcagtgaatttttaagcaggataaacacaaagaaataccaaaaccacacacaatgggggtgggaggggaaacttaaaattagccagagacaagacacattaagcacattgcctacaatgggacgaaatatactgatttatttagaaaaagcatggcagcctgaatgggatggaattacatctttaacatgtaaaagaacaaaagaaagaaaacagtgaaagaaaacctacaattctctgatgtgtgggggaaaaaaatctacaaaaataaaatcaaaacagatatttttggtctcaaatacaccgtggtcatctggtttataatgataactactgttgttcacttgagaaaaagtggtttttcaacagcattctgtgttcatatgtgaattttttttaaacctgactttatactacatagaaacacttactcaaagtaggtcatagccccacttgtgcatggtacaataagactttgagagaaaaatgcacaggaagttattcttatgactttgggcttggaaacaattattttcttttgagacgtggtctcaccctgtcactcaggttacagtgcagtgacgtgatgacagctcactgcagcaaccttggacctttgggctcaagagatcctcctgcatcagcctgatgagtaagccgtgactacaggcatccaccaccatacctagataatttttttgttttgtttttagagacgggagtctcactatgttgcccaggctggtctccaactcctggcctcaaacaatcctcctgcctcagcctcccaaactgctgggatcacaggcatgagccaccaagcctggcaatgattccctaaacacacacaaaaagcagctgaacacgaaaagacacattcagttttgataaagaatctctcttaattcaaagatgatattaagaatgtggaaaaccaaaccacatagaagatatttgcaatgcatgtatttgacctaggattcattccgcaatataagaaaaacacctgtcaatcaattagaaaaagacagcccaataaaacaatgggctacatcagcacatcaaacagacatatcacaacaggaagcccagaaagtcaaacaaatgaaaaggcgctcatattattagtcattagagaaatgcaaattaaaaccactcagatattatgcccgaagcagaatggatttgaaaagatcaacacccttaagtgttggggagaaaacgggacaagtggaacacattcatttcataggcaaataatctggtgaagcctctggttaaaagatactgattaagtctagtttcactggaagtttcataaaagcatatttttaaaaacagctttgtacatttcattagtaaagtttcctagttttaagaatgcactattgttatgtaagatgttacctttggtggaagttgggtggtgattggtatatgggacttctctgtactattattgtaatttcctgtgagtataataatctttcaataaaaagtaaacaacaatgacaaagtaaaatggctgatgtggagaaacaggtgtttgtcataagggtttccagatacacacgaattaaggtgtggtatccataaaaatgtttgtccagggccactgcacagtattagatgtttttttcctagtacaagagcccctgggttggatttaggcaaataccccattctgttttagccaagctgaccccctcccaccaccagaagagaagcatcactctaatctctcctagggcacttcacaggctagcactcagtagtccagtactagataatcctttgttgttggggagctgtcctgtacattactgggtatttagcagcatccttggtgatatggtttggctctgtgtccccacccaaatctcatcctgtagctcccataattcccatgtgttgtgggagggacccagtggaagataattaaatcacaggggcgggtctttcccaggctgttctcctgacagtgaatatgtttcacaaggtctgatggttttataaaggggagtttccctgcacaagctcttttctcttgtctgccgccatgtgagatgtgcctttcaccttccaccatgattgtgaggcctcccaagccacatcgaactgcaagtccaataaacctctttcttttgtaaattgcccagtgttgggtatgtctatcagcagtgtgaaaacggactgatacacttggtctctatccaccagatgccagcagcaccctccccactcaactgtgatcattgaaaatgtctctaaacattgacatccccaaagggacaaaattcccccattgagaactactgagctagagagaacctgactttgaagaccttccaccaccaataccacactgaagtaaatgaatagttagtttaccccaaaaggcaacattcccagctacattatgtctatcattgtagatatgttccccaatccttatgttaatgtataatagataaaaccctatgcaaataacataattatgaaatggagcaaaatactatagaattttgaaagttccccctgagaagagaaagttagagtagaagttaaaaaaaaagttgccatgatatggaaacagcttgaataaggaatgagatctacagcagttctataagctcaaacaacccttatgcatagaacctgcctctttctcctgatgggtctagacgcataaaattaaccaagtatagatgaatctgtcaattacatttttgacggttactgcaaagacaagacagtgaactgggagagagaagagcatattctcttagggggtttagtgggctgattttatttattgctgcctcaatgacttcctttgttctctttggaaagatggattggccagtgattattctactataaagatacatgcacatgtatgtttactgcggcactgttcacaatagcacagccttggaaccaacccaaacgcccatcaatgatagactggataaagaaaatatggtacatgtacaccatggaatactatgcagccataaaaaaggaagagttcatgttctttgcagggacatggatgaaaccggaaaccatcattctcagcaaagtaacacaagaagagaaaaccaaacactgcctgttctcactcataagtggagttgatcagtgagaacacatggacacagggaggggaacaacacacactggggcctgtcggtgggtggggagctgggggagggaaagcattaggagatatacctaatgtaaatgacgagttgatgggtacagcaaaccaacatggcacatgtatacctatgtaacaaatctgcacgttgtacacatgtactccagaacttaaagtataataataataataatagaaaaagaaagatagattggctctgcctggaaatcacccagttaggacaggggctgctctgacaatgttcaagaggaagaaattactttgggcaagtcattctccccctggctttaatgctgtcaactgccaaatcagacgatcacacttgtgatcattaacatgcttcagtttcaagtttctataaatatctttagggaaaaaaaaatgttgttcttgttttggcctggttgcctgagggcagaaccaggaagtatcaagggaggtgtccgtgagatgagcctggatgcagtggctcatgtgaagtactgtaatcccagtactttaggaggtcaaggcgggcagattggttgagaccacgagtgcaagatcagccggggcaatatggtgaaaccccatctctacaaaaaattacaaaaattagctgggtatggtggcgtgcacctgtaatcctagctacttgagaggctgaggtgggaggattgcttgaacccgggaagctgaggttgcagtgagtcaagattgcgtcattgcactccagcctgggcaacagagtgagaccctgtctcaaaaaaaaaaaaaaaaaaaaaagaagtaattaaagtgagtactagagatgggaaggcggaaacaaaccttctgagaggaggccttgcccggcagaatctaccttcaccttatgagagagacagattcaaaagatgaaaaacaagagagatgaaggctgatgcaatgaccctccaggaaggaaaacaagaaaatcaaactgcaaagcccaccttggaaagaaacagcactcggcatgaacagcccggacttacatcagctcttctatcttgcacattggatgtttcagcgtctcacacaggtgtctgatgtcagactgggagaggctagtgccgtacaggctcagaagtttcagatgagggttgtgaagaactgccttaaataattctgaatcatgtccaaagtacacagaagtaaatctgcaaaagattaaaaaaaaaatagcatcatgcaatgagatcccagcacaaagacagacacctcttgtacgattcttcctgccctgaatgctgggcctcaccacactgtttctggaattctggttactcctgccagtaaattatttctcgatggggtttttagacaccagacagcacagaggctcaagctgcttagaactttcctgtttcttcctagcccctccacttctacataactccaaacatagaaggagaacgagtcagccgaatcccatgttaaaccgagccccatggggacaggaacaaactatacttgtacctctttgtattctgagattaatgtgattaatgcctcacataaaatgacgcacacatatctgaattaatgctccaagcaaaactgtgttacccaaggaaataacccatttctgttttaaaattaagatttttttttttttaataaaagagacaatgttatgtagtgtcaaaaaactcaggctccagagttacaggaaactggatttcacattttgcttttctccttgttgcttttgcaagattgggcaaatgacctaatggctgtgtggcccagtctcttcatgaaagatatggtcatggtaattaagaaattaacatttaaggccaggcatggtgactcacacctgtaatttgggaggccaaggc[131 bp omitted]gaggtaggaaaatcacttgaacccaggaggcggaggctgcagtgagccgagatggtgccactgcactccagcctgggcaacaagagtgaaactgtgtctcaaaaaaaagaaatgagcatttattgtaatgcctggaacatggtcaattcatgctggcttttattttaatatctacatgtatatgccatatatgtgtatttataaaccaaatacgtaactacaaatatgtgtctataagccagatatgtacatatttaccagataaatacaaaaccagaatatgtacttaaaatccagacaaaatttatgtataaaccatatataatatgtatttattagcctgataaatgtgtatttacaaaccagacacacgtaagaataaatacatgacacacagaacttgctctatgtgactcctggcgttacagcagatgagcgcaccctgatttctctcctagtcaactttaagaaatgacagagaattttaaaagtaaatacttttaccatgttcaaaaactagaatggaaattttgagtaggccagaatcaaaacacagataagggcagatcacagaggggaacagcaggctggaggaactgtgcggactgcgggcggagtgatcccctaaatgtctgagtgacacccaggtaccacctgcccggagataaaggaagccaggagctggtgacagggcggtgaggtgtacagggatctgtgcggcgagggtgagcagagcctgacccactaacaggtggaagtgctaccacatgaaaacagggaacccaggccgggcgcggtggctcccgcctgtaatctcagcactttgggaggctgaggtgggtggattgcttgagctcaggagttcaagaccaccctgggcaacatgatgaaaccccatctctactaaaatacaaaaattagctgggcgtggtggcgggcacctgtagtcccagctactggggaggctgaggcaggagaattgcttgaacccaggaggtggaggttgcagtgagccgagattgcaccattgcactccagcctaggggacagagcgagactgtctcagaaaaaaaaaaagaaaaacagcaaacccccttgatttctggagacacctgtgagaataagcgggaggtggtggcaaaaaggacaggaatatccggcctccaagccaccacaccacattcatgaaagcaccgggattggttagctaggcagctgcagtgaatgccaaccgtcagccagcagcaaacaatcgagtcaacagacaatatggtgggaaaacagtcacaaagatgaacatgtaatcaggaatcatcgccatttcaggataatcaacctcatggaaaaggggcaaactaaaatagaagagttgattatgataccatttgttgactatttgccttgtcaactttttcctttttctacacataaaatgataaaaaatgcaattgctgagatgaataaagaagcagaagcctgggctcattccttcaactttgagtccaatgcctccccagcgttagggattaaggaccgctggaggtatgtgtgtttggaacatattgatccatctgttattagtctgccctacaacccaaggaatcaatctacttctctcagcctctactgatgccactctgtttccagaaactattatcactttttctcaagtataacttcttccttaactatgagggaaaaaaagttgataaatagaacaggatctgaactaaccattccatgtgagtgatggcagttgaatgatacctccaatgttccctaaaccctaaccttggggaggcattagaatcgatgttgaaggaatgagctctggcttctgattctccatcgtctcagcaattgcatttatcattcatatacacaacagaaaagagaaggaaaaacatttttcaatttcaaggcatgtggctagatacctttgaagagaaatgaccaaactgtctctatcatttctggacaacttaaaatgaatctaatgatgtttttactagacactgaactaaaggacttgtgtaaaatatcaatgagttgggaggtcaaggcaggtggatcacatgaggtcaggagtttgagaccagcccggccaacatagtgaaaccccatctctactaaaaatacaaaattagccaggtgtggtggggggcacctgtaatctcagctacttgggaggctgaggcaggagcattgcttgaacctgggaggcggaggttgcagtgagctgagattgtgccattgcactccagcctgggcggcagagactccatctcaaaaaaagtttttttaaataaaagatcaattatttattctgtcatcaacactgtgaagaagcactaatgtcctcattttgtaacctaaggttcctaggaaggacacgtgcatcttaattcacgccttcacccaggtttatccagattactgttctgcttcatgttaccattgacctcatgtgaaaatcaatgacttcttgtgctttgagactgaatttataaaacaaaaatcaatgacaaatgtcttcattgcaagaccactaaccacctcttccttgctagtatccctcacatatcccattgaaattcagatactgcttatgcgttataatcaagccagtcccctactttaacattttccagaaaaaaaacagttcagtgaggtccactttttactctccatgtgggatctttagaaattcttttgagtcagttccttcattattttcagcacacattcattctatggatgtttagtgagcccctacaaggctttgtatttttctagatgctgaggatgtgagggtaaacgcatccccatccatcatggaggtttagtcaacagagaaacactgtgctccccaagatcactcctagctttggtgacttgctaggagaccttgtacgacttgcaatacagtcttacaatggctatgatttatttcagcaaaagcacacaaaggaaaaaccaccaaggggaaaaggaacataggaaaaatccagagaaaaccagacagaagcttccaagagtcctctccccgtgggatcaccaggacacaataaattcctctagcaacaaaatgtgagaacacatgtgaagtgtcatctaccagggaagctcattaaggattcaatgtccgtggtttttactggggcttgtcatataggcaccctctgcctagcatgaaccaaaattcaaaactcactgaaggaaaccagacattcagtataaaccacagtgccggtagaatttacgaacagtgaaccattcttatcagtcaggttggtggaaactctcc[134 bp omitted]cccgtctctactaatacaaaaactagccaggcgtcgtggtgcatgcctgtaatcccagttactcgggagactgaggcaggagaatcgcttgaacccgggaggtggaggttgcggtgagccgagatcattccactgcactccagcctgggcaacaagagcgaaactccgtctcaaagcaacaacaacaacaaaacaaaaacaaacaaacaaaaaagacatcagccaaggaccaacttagcaaacaggcctttctcgagacagcagtcttaacgtctgctatgttaacttttttctgcacaaatatgtgggccaataattcaacgcaataactcttaccaaaaagatgtataaggtgctttgggagcatagcaagtcttccgtgatgacatgacttttcaagctgaaggaagacttaaatttaacctgaaagcagtaagtttgcttacaggggtgaagagaacagcatggcccaggcaaatcaagataagtaaaatatcagggaacaactgtgtttctatcctctcatacattatttgtataaaagtaataataaaaactttattaggattaaaagaaacggaagaaaatattgcacatcagcactctgttttatgaatgctaccattatgcttatcttatttttctttttctttttttttttttttttttttttacaaatttaaggctatttttctgtctgtcctcagcactcttcctttctcacctgagaaacatctattctccatccactcacatccaagcaaaggtcatccctaaccaggactgctcgctctctggccctccaactagatttcattttacatgtcactacatttttttttttttttattatactttaagttctagggtgcatgtgtacaacgtgcaggtttgttacttatgtatacatgtgccatgttggtgtgctgcacccattaactcgtcatttacattaggtatatctcctaatgctatcccttccctctccccccaccccacaacaggctgcggtatgtgatgttccccttcctgtgcccatgtgttctcattgttcaattcccacctatgagtgagaacatgcgttgtttggttttttgtccttgcgatagtttgctgagaatgatggtttccagcttcgtccatgttcctacaaaggacatgaactcatgcttttttatggctgcatagtattccatggtgtatatgtgccacattttctttatccagtctatcattgatggacatttgggttggttccaagtctttgctattgtgaatagtgccgcaataaacatacatgtacatgtcactacatttaacacactggattgccgctctgcatttatgcatgggtcttcttccaaaaaggccacagtagagagaaggaaactctgccatttgcttaaaggacaggttaacataaaacttacatgagttttcggagtttacaaacaggctgagccagcgctttgcaaagaatcgccagggagggatcatcgaggctggtattttccatgtctaaaatctggaagttcttgttggtaatgaacattgagcaaagctcccgccagtagacgagcttctcattgtaactatgagagaacaaagattgtgattctccagtggctaaactcaattcaagacattctcaaaacaggtcgaacaccatttccaaagcacctcaaagctgacagacacccaggcctgaacagggagaaggtcagccaggtaaacggagccaacatgacataatagttagaaagtaggccctggccaggtagagtggctcaagcctgtaattccagcactttgagaggccaaggcaagagaatcgcttgagcttaggagtttgaggacggcctgggcaacatagcaagactccatctctattaaaaatttaaaaaattagacagatgtggtggcatacacctgtagtcccagctatttgggagctgaggtgagagaatcacttgaacccaggagtacaagactaaagtgagctatgatcatgccactgcactaagctagggaaacagagctagaccctgcctcaagaaaaaaaaaaaaaggagcactatttacaatagcaaagacatggaatcaacctaaatgcccatcaatgatagactggataaagaaaatgtggtacatatacatcatggaatactatgcagccatgaaaaggaacaagataatgtcctttgcaaggacatggatggagcgggaggccattatccttagcaaacgaatgcagggacagaaaaccaaataccacatgttctcacttgtaagtaggagctgaatgatgagaacacatggacacagggaggggaaccacacacactggggcctgttggagtgtggggcttgggaggagggagagcatcaggaagaatagctagtggatatcgggcttgatacctgggtgatgggatgctctgcccagcaaatcaccatgacacacgcttacctatgtcacaaacctgcacatcctgcacatgtatccctgaacttaaaagttggaaataaaaaaaaagaaagtggatcctgagacaagagtagttgattggaatcaaactctggtgtaaacatttagtaactatgtgaccctggacaagctattcaaccttattctgcttcatttcctcctcgtttagatgtgaatactcgattgttctgtgaacaagggttatttggtgacccctcagtgaacagggaactgtatccaaaaatgttatcatgaacagcagcatgtatctgagagctaacgtatgagctggtaacctgaacccgatggaagaatacaaggcaaaatcagcagagggaaaaggcatatggaaaaaatgcagaggaaacaaggcacgaacttccaggagtcccctctcagtggggtcactgggggataccgcacaagctatggagggggaaaagaaaagcacagtctgacaacaataaaaatggtgaaaaaaaaaaagaagaaaaggaaagaaagagagaaaaaaagaggaaggaacggagggagggagggaggaagcaagcaaggccaggcgcggtggcttatgcttgtaatcctagcactttgggaggccgagatgggtggatcacctgagttcaggagttcaagaccagtctggctaacatggtgaaaccctgtctctaccaaaaatacaaaaattagccgggcgtggtggcgggcacctgtaatcccagctacctgggaagctgaggcaggagagtcgcttgaacctgggaggtggaggttgcagtaggccgagatcgcgccactgcactccagcctgggtgatagagcaagactccgtctcaaaaaaaaaaaaaaaaaagtcctgctagccgcctcttaatctcacacgagccctatgaagtagacaaaacttttatttctctttatacaatggaaaaagttcaagaagttgcagctcatgatcccacagcagtgccaaggctcgaaaggaaggctttctgactccgacctccatgcttttaagcacagtggcataaggcccatgaaatacccacaggccactagagcaaactccaagtgtagtgtgtgggacgggggattaatagacagactcactctgagatgcatcctgagtcatctggaaagatattctccacacacatgcgaagtgtcgttaaatgttgacaatgcttcaggcagaatgaagctattaccaaatgttctatgttaccaatataaatgaaaacttcttcaaagaaattcatcactttggttacaaattctttttcctgagtttcaaacaaaccaatgaatagttcctggaaagctatggcttccctatcagcttcacattgacttaaactttcaaggcattgggttatttcctgctttaggtcttttgacagtggaaaaccaaaggaggtctccagcatgctgacgatttcttctgttgaaattccaaacatgaatatccccacctgggtcaagagggtttgaggctgaaccacacttgctcttacaagctgggttatgcttccaatggccgggttaggatcgtctttgggtcgtttgagcaaataaaacatggcggcacaaaactcttggatacacagatgcatgaaggcaaaacagtcccctctcctttggaggagtctcatacccacccacatcacgccctcagactcagataacccattcctccggagatccccatgggaaaatacaaatgtatatgtccaaattccctctgcagccaaagcacacaggctttttagtcgggctctgttcaccttaggtggaaaactctgacttcctgctttgaatacagttgttaaaaaggatgcatataaataggtggtgttttgggagtttatttcaaggtcttctcccctctctagcctctgtttcacacaagtacagaccaaccagcacgtaaagggattatggcacaagataaacagcggcccattatctctcacaaaattgaagactttcagggctttgctcttctcaccaaagaagtaggagaaatacgacttcttttcagattcactgaatcctaagagctttatgagttttggatgccgcaacataaaatagtgtttttgcatagccagttttcctaatgcaataaggagagaggattctggaagcatctttttttgcaacaaactgctcaggataattggcattggctgccgctgcctccaatcatcgctcaagtcagccttaagttgtaagttaaacttcagttgctcaaagccatccatgatgaacagaattctctctggctgggaaaaaatgtcttcgatcttctctgaagactccggccagtccctagagaggagctccagtaagctggtctctgcgataccgttcatttcacagacattgaggaaaaacacaaatgtgaacctgtccttccataagtttccctctgcccagtccaacatcacttttcttaaaagggttgtttttccaattccatcaggaccttccaggaccacagtgtgtcgtctagccgcagcagtatatgcgtcattcaattctttatactcatttttcatggtttctttgtagaaatgctcagggacgtgaagacaggtttccttctcccatatgagttgaaatgtttccttcatatgctttctgtatgggtttagcttatctgtgttaatgagaacaggatataagataggtaaaaatgcactcattcttttatacttctgagaactgtaaaccaaaaataaaattctaatactcgccagccatctgaagccagggtgcttttaaaatttaacctgagagactggttcacgccatgatgggaagtgggggtcagacatacttccttgtacctctccattaacaggaacacaggcttgaagtctgataagaaacattttacaacctattctctctgaaggtctcctgtgcaaataaggatgtggatctccacaatcctttatcttaacccagacatttcctttattttgatcccaggtctttagata[138 bp omitted]gccgcagcctcccgagtagctggggctacaggcgcccgccact[187 bp omitted]gaggcacaagaattgcttgaacctaggaagcggagattgcaataagccaacattacaccactgcactcaagcctgggcaacagcctgacactctatctcaaaaaaaaaaaaaaaaaaaaaaaaaaaaaaattactatatcaattgtttctaaaattggtcttgtctatataataaccttcccctactttctgcattttctttaattaaactgatgatagcaggtcacctgtcagcaaagtacacatatatatacacacacacatatatatatatatatacatatatacgcacacacatatatacacacatatacatatatacacatatatacatacacatacacacacacacacacatatatatatatatatattttttttttttttgagatgaactctcgctcttgtcccccaggctggagtgagatggcgctatctcagctcactgcaacctccgcctcctgggttcaagcgattcttctgcctcagcctcccaagtagctgggattacaggcacctgccaccacgcccagctaatttttgtatttttcgtagatacagggtctca[134 bp omitted]atgagtgatgagaaatggggaagggagaagaattaaaatcctgttcataatctgagttttcaaatttcagaaaaattttgagtcttgggaagggactggacggaaggagattgcaaaggggccctacagtcgctcacaggaaggcagggacggttccaccgatggtctgtgctctccttgcacactcgtctgtggacatcacaggagggaacagcatccactttattctccgctatatccctttaacaccgtcgcacaggagttattcaagtctctgagcagtgactgactttgtataaaattaatattgtaaaactgtcttgaatttaaaacatacatgctaggcacggtggctcacgccggtaatcccagcgctttgggagtgctgaggcaggaggagcacttgaggccaggagttcaagacgagcttggccaacatagtgagactccatctctattaaaaaattaaattaaaaaatatgcagataaagagaaaggaaataaggccattccaaaatgtcatcaatgtatgtaatcatggctcatagcttgatctgtgtctgtattactctacatttttcttctgcccgatttttctctctacagtagaattatactgtatatactattttcaaacatggtttttgactgaacaatatattatggacatctttctaaattcatgcacatttttcatcacaaaacactatgctatttattaaaaaatttttttttttagacagagtctcatcactctgtggcccaggctaaagtgcagtggtgtgattgtggctcactgcaacttccacctcccgggttctagtgattctcgtgcctcagcctcccgagtagctgggattacaggcgtgcaccaccacgcctgggtaatttttgtatttttagtagatagagtgtctcaccatgttggccaggctggtctcgaactcctgaccttaggtgatccgcccacctcagcctcccaaagtgctgggattacgggtgtgagccaccacgcctggcaaaaccctatgctatttaattgaatggatttatcattatattattcactttctatatttgcccatagtaaacatttgctgacctccaag[179 bp omitted]gtggcaggcgcctgtagtcccagctacctgggaggc[144 bp omitted]tttaggacctcagtgtcccaagtgagaaactctcagttcagacactgactcggtcattttttcatctgccaacatagaacattaatcagcagaaaagtcaaagacacgaaccacacagataaagaaaactggcacacacctgtaatcacagcactttgggaagcccaggcaggaggatcatctgaggtcaggagtttgagaccagcctgaccaacatggtgataccccgtctctactaaaaatacaaaaattagctgggcgtggtggtgcatgcctgtaatcccagctactcgggaagctgaggaaggagaatcgcttgaacctgggaggcagaagttgcagtgaaccgagatcatgtcactgccctccaacctgggcaacagagcaagactccgtctcaaaaaaataaaacaaaaacaaaaaaaaaaacaaaaaactaacacagcaagcaactccaaaccaaataaaataccctcaagcatgtggggatacgaaataaggtctcaaattagaattaccaacacaaagaagaaacatgaacaaaacagaagtaaacgtaacagaagttgatggaactcaaaagtaaagggagaagataacaatcatcagaaacaaatgctaattactagatacctaatagggaatatatttagtttttcctaagtatcccccgagaggagggtgtagaccccatcaatgagtccagcagaactggttcggagtcagatctgtcacttttggaaaagtcatgtaacacatgggaacactgttttgtccagttttctcacttgtaaacctttcctgggttgtgataagaatgaaaagacattatgcagaaagaatgcttccaggacgtgaggacaacctggctgtgatgtctgtcaccccattggtcgccccagggctaattcggctgatgtggccagctgggtgggtgtccacttcctccctcactgctccatatgcgtccgtcctgaaagtctcccctgggtcaaagacgatgacaacctttgcccatagaggaaggtccttccatcgcgggcagaagagaagctgtgctcccctactagaacctccaaacaagctcgcaagaatgcttcctgtagtacccgggacatacgctgtctgattgtcttaagattctacctactccttggtacatgtctggtcaaaaaggacaggcagttaggcatggtggctcactcctgtaatcacagcactttgggatgcctaggcaggtggatcacttgagcctgggagttcaagaccagcctgagcaacatggcaagaccctttctctaaaaaaaaaaaaaaaaaaaaaaaaaagataggcaactaccatactagaattccatctcagtagacctggcaatgcagacactaactggccactcatctcctataacaacgactccacttggggtggaaaaatgggaagacactccataggtgaacagttggtatcaggacgccatctgtccccagttcatcgctggcccacatatgaacagccctggcctgcaactcttcctaccttcaactctcaccttgacccacacacattctcatctgatggagggggtggccactcatttaacaatgctatcaccttgttcccaggcttcccccatgggtcctcgccccatcatccagcacttacttctcatctcttcctgagcctttgtccagagatctttcctattgatctgtagaaacaggttcagtgttacctcccatgcctgctttcctgggtaatgtttgtccagcagctttgctacatcttctttggaggccttcttcagctcagcccaggggattggcttgagttcaaatttctccaaaggttgtttgaggagctccttaaatttccaaaactcttcctttctgagctccttcagataccacaacaagccaaaatccgaaaaaaaagattctgccatatcgccccaggattgtgaactgaggtgtctccagagggaaaagaaagatcctcaaaaataaagaataaatgatacctggagaagaatgacatgattacagagttaagcttcagcagctgaaagcagctcaaaattattgatatcatcatgcgtagcttgcaccaaacatcatctagggaagaagcttcatctttttccaaacaaatgcatgtgaatggtagagttgactgccacttatgtgtcttgtttttgtctgacataaatgatgcttccaggaacaagtgtttttgtgtagtttggtgtatataagcacacatttctctagatttataaattataggtcaaacagcaaacacaggtcaccatgtttgctacataacactcaacggttttcccttgtgtatataattactgacattcctaccagcattctatgagtttgtttgctctgtagaccttcccatccttagtatagtctaatccaattttgataatgaaaaaatgaacggatattaaaattacagatgatcacattcaggaagatgaaaataaaggaagagga[202 bp omitted]accaca[172 bp omitted]gaaaaagttagatttactataggttagcatctgcagacaactcagacagaaacagagcagtgaacgttcccagtattataaacccttcagataatcattgcaattcaacaaaagacaggaaatgaagtagaaatatatggtagacaaaataagacaggtggcaaaaataataccaaatatatatagatatgtattttgagatagagtttcactcttgttgcccagactagaatgcaatggtatgacctcagctcactgcaacctctgcctcccaggttcaaatgattctcctgcctcgtcctcccaagtagctgggattacaggcacctgccaccatgcccggctaattttttttttttgtatttttagtagagatggggtttcaccatgttggccaggctggtctcgaactcctgacctcaggtgatccacctgcctcagcctcccaaagtgctgggattataggcttgagccactgcgcccagcctaaatataatcttaacacatatgaatgaaataaaattgctcactaatatatagactcacattggataaatacaaatcctgctatatgctgtttataagagaatcctagaaaatacacagagaagtaaaacagaagaagaaaaagcctggcaaattcttacccaaaaaagtattaatagtataaaatatcagcattgaaaaacactcaagctagaaagcactaaatggactaagaatttttgaacaccaagattcagttccccaagatctagaactcatgagcatatgtgcacctgggaataccactttacacataaggagatgatgacaaacgcaatatcattgtatctgagctaatatacctttcagataattacaaaccattagcaaaggttacataccatctatggtcacatgcaaaagaataaacttggacccttaataccataaacaaaaattaatgcaaaatggattgaagaagatctaaatggaaggcccaaagtataaaactcctaggagaaaatgtagggcagaagcttccagacacagatttggtctggattatttcttgaatatgacatgacacagacaaaagaaaaaaatagacaaactggactttataaaaattttaaaattttgtgcatcaaaagacagtatcagccaggtgcggtggttcatgcctgtaatcccagcactttgggaggccgcagcaggtggatcacttgaggccaggagtttgagacccatggcccacatggtgaaaccctgtccctactaaaaatacaaaaattagccaggcgtggtggcagacacctgtaatcccagctgctcgggaggcggaggctgcagcaagctgagatcacaccgctacactccagcctgggtgacagagcgagactctgtctcaaaaacaaagacgatatcaaaagagtaaaaagtcaaccaacagaatgggagaaaatatttgcaaagcatgtatctcacagggattaaaatccagattacagggaatgcctaaaactcaataacaaaacaatcttataacaatgagaaaaggactagaatagacatttctccaaagatatacaaatggtccatagccaataagcacataaaaagaggctcaacgtcactaaccattagggaaatacagatcacaactacaatgagataatccttcacatccactaagatggtaactacaaaaaaaaaaaaattcaaaacaagtgttgatgagaaggtagagaaactggaacccttgtatcctagtgacgtataaatgttaaatggttcagccactgtggaaaactgtatcatatttcctgaaaaaataagaacagaattactgtaggatccagcaaccccaaagaattgaaagcagactctctcagagttatccggacactcatgttaataggagcatcagtgacccaagtgttcatcaacagatgaatggaaaagtgaaatgcagtctataaatacagtattatacagccttaaaaaggaaggatgctgggcccggtggctcctgcctgtaaccccagcactttgggaggctg[137 bp omitted]gctgaggcaggagaatcgcttgaac[142 bp omitted]tgtccccaggctggagtgcagtggtgcgatctcggctcactgcaagctccgcctcccgggttcacaccattcttctgcctcagcctccggagtagctgggactacaggcgccggccac[184 bp omitted]ccttgaggacattatgccaagtgatagaaaccagtcacaaaatgacaaatactgttccattaaacgtatatgaggtacttaaagtggtcagaatcatagagacaaagtagaatgatggttgccgaggctgaagaagaaaatggagagctattgtttaatgaggacagtttcagttttacaagataaacagttatggagatggatgtgacgatgcttgtacaacattataagtgtatttagtaccactgaattatacacttaaaatggttaagacggtaagttttgtattatgtgtattttaccacaataaatttcttgagacaaggtcttgctctgtgcccaggctgagtgcagtggctcaatcacagctccctgcagcctcgaccggccccccacccacacccaccggggctcaaggacctcctcagcctccccacctccgcctcccaagtagctggggctagaggcacacaccaccaggcccagctaatttttttagatttttgtagacatgatgtctcactatgttgcccaggctggtctcaaactcctggtctcaagtaatcctcccacctcggccttccaaagtgctgagattataggcaagagccaccacacccagcaaaaaaaaaaaaaaaaaaaaattagtaatatgctattgaggtaatgcacaagtttgtgacatatgtatgtgaaatatatgtatacattttttaaagggaaagtggtttgattccaaatcaaatatgtacatttcattcaaacgcatatgggacatttactaaacatgaccttatcttgggcataaagaaaaactaaaagagaaacaggtattctaaatcagagatcactggtctcattcaacaatcacaataaaattagaaaataaaggc[149 bp omitted]gcctcagcctcctgagtagctgggattacaggcacctgccaccacgcctggctaattttttttatttttagtagagacggggtttcaccatcttggccaggatggtctggaactcctgaccttgtgatctacccgccttggcctcccaaagtgctgtgattataggcatgagccacggcgcccggcctccatagttaaattttaagtgtacattttaatgtaacaggcaagtaagaagctaatttaacttactgagaaaggaacagacaaacttcatgaaataaacttcaatggctgttaaaaataggaaaaattttctagaagctcattttccatccagatttgaaatatataggccgggtatggtggctcatgcctgtaatcccagcactttgggaggctgaggtgggtggatcacctgaggtcgggagttcaagaccagcctgcccaatatggtgaaactctaactctactaaaaatacaaaaaattagccgggcatggtggcgcatgcctgtaatcccagctactcgggaggctgaagcaggagaatcgcttgaacccaggaggtggaggttgcagtgagccgagatcacaccattgcactccagcctgagcgacaagagcaaaactcagtttcaaaaaataaataaataatatacataattttcatcataatatatggggaaatggatgttaaacaatggtggaatacaaatgcatgtaattttggaggaaaatgtggcaacctctattaaaatggaaaatgaagattttcttcaaccccacgattttactctctggttatccattccaaagtagcatttgcaaatgtgcctagagttttgtgtgcacaaatggtcgctgcagggttttaaataattgttgaaagcaaaaacctaaatattcataaataagaaaacagttaaataatggtatactattatagtacaattggaccattgtatggagtcagacggagactagaggggctggagaagatacggggagtggtttgatggacattgcatagagtttcagtttggtatgaacaggttctagggatggtggtgatgaccgcacagcaatgtgaatgcacttaatgccactgaattgtactcttaaaagtagttaagatggtaaattttatgtatatttcaccaaaagtttaaaacaaacaaacaaacaaaaaaacaaaccccacatcccctcaatctcttctccgaacattcctttctcctccctgctctaggggacacccccctctacagatactgagtctcccgcggctctctcatgccgacggtttcatcagccccattcttcatgctgtggagtccagataaggtatagataccctcgctggtgctccctaacacctcacagactttcggccaacactaggctccaccacccattaccattttgtgttgttgccatccaaggtctctggcacaatctcctcattcctcccagattctaccccctggctcacccctactctcaagctattcttgtgggcatgcaaagcaaccattactgacaacgtgatgaatatgtcatttagcataaggttaggacattttagaactggctgataaaagattacttcaaaaccaaccagccaagtcaccagatcaacaggtctcaaacttccttctctccacttcactctttctcactgccagagatttggtgttttattatttgtctccccaggttacatgaatcccccaatcagaaccaacagaccaagtctggaaaatggaccttcagttttcgatattttcatcatttctcctcagctctccaagacctccaattttctgtatctctaattcaatttcagaaaaaaaaaaataaggagacaatgccttctggaagagtccctttctctcacccaatttagagtccggaaacacaaaagttaacaagtgaaagtgccgggtacacaatctctctgcaaatttatctggttttcattacaggccgggagcagtggctctcacctgtaatctcagcacactgggaggtcgaggcgggcggatcacttgaggtcaggactttgagaccagcctggccaacatggcgaaaccgcatctctactagaagtacaaaaattagccgggagtggtggcgtgcgcctggagtcccggccactcgggaggctgaggcaggagaatcgcttgaacccaggaggcagaggttgtggtgagccgaggtcgcgccattgcactccagcctgggtgacaatgcaaaactccatcttaaaacaacaaataaataaataaataaatggttttcactacaatgcatccttgccaaaacaaaaggtcaagacttgatcatttctggtgccctcttacctgttccttatgcactccagaccttcaggaagcactgagactttagggaaatgaagaagaaagaaaggtcagggggaagacttacccaacccagcccctggtcctcctggctggaactcaacaaagaacagcggtggaaacttagaataaaaggccctggctgctctgtgactggccacagaatctctccttttcattggctgtcatggatattgatgactagacccagacggcaattgtttaggttcttttttaactcctcaggtgtgaatgcttttcccccagctggatagtccgtgctgctgttaatatcatctccctacgtaatataatatgatcacagggcttctgcgaactatcttctcccgaccaatgagagctggtttggagactagtaatgggaaccactgttctcataatctgagtatctgactcctcctatgaacttcctaaggaaatctattttgtgcatgtctcaacttccgctttaaaagttgagcacttaaaaaggagcatttgcatgtaaggaaatcaatgaatatgctcgagtaactggctttggatgtaaagggcagaagtcagaatctgcagttgtctcccaaacaccctgttaccctcatcattgactcctgtgcgaatgctgccccctcttcacgctcatccccattatccctcccgcagctgccattcttgtccccaccctctttaacattaattgaatgctaatggtgtaaaagccctacagctgagtgcatttcatgcaagatccttctcttcacagtcctcggaagtagatagcattattattcccattgtcaaagatacttgaggccatcagggtggaggctagagttgagaacattcctacttggtcagcccaaattttaaccgctgcattgtcctgcctcccagccatcattgatcccagtgaggcttaggaatgtctgtgttggatctgtggggagatgtggctcagttctgcctaatgagactgagctaagagactcaaagaatctttcctctccaggatcttggcctttctttaaccagctactcaccatcaaaattctgacctgacctctttaccctgactgcttaaaccatccttagctgggccggggtgcatccattagagggctgtgtcttgatctccctttcttcagtttttctgatagccaccacaggatctggcatagaaggttagaagtggttaagcacttgagctggaacagcaacctctattctagactgttggtgtggctatgggcaagtatttattaacttcacttgtttttcctcttctgtgaaatgaagaggatgatgatcgtgatgatattgatgatgatggtgatgatggtgatgatgatgatgacggtgatggtgaagatgaagattattatggtggtgatgatggtgatggtgaagatgaagatgatggtgatgatgatgacggtgatggtgaagatgaagattgtgatgatggtggtgatgatgatagtgatggtgatgatgatgatggtgatggtgaagatgatgatgatggtgatggtgaagatgaagataatgatgatggtgatgatggtgatgatggtgatgatggtgatgatggggggcggaaagggtggctgggctgtcacttggtttctcttttgtgaattgcctgttcttttccttaaagatttacctgactttatgtatttttttgtgtatatttatgcaaaatacaatttgctggttaatatagaatcataaatctttctaaaatttgggattttctatttattgtctatggtattttaggggtagagttgttttaaaatgtattaatgtctatttttattaatcttatcatttgtgggtgatataaatacttcctgtcctgaaagtcaactatttccctatattttctttcacacattaatatctctttttacattttcaattcacttatacataataaatcttcataatgtgatgtagtggttcagttttatctattgataccaattacttcaacacatatattgcatagcctatcttcccataccaattttctggcgccatccacttgttgtgaaacacccacctgttgccttgatctctttctgtaacttttgttgtactatatttgtctattttctgttactgctacaatatcataccactttacagatattgagtattggccgggcacagtagctcatgcctgtaatcccagcactttgggaggctgaggcgggcagatcacctgaggtcaggagttcgagatgagcctggccaacatggagataccccgtctctactaaaaatacaaaaattagccaggtgtggtggcacatgcctgtaatcccagctactcaggaggctgaggtggaagaatctcttgaaccccagaggtggaggttgcagtgagctgagatcgcgctattgcactccagcctgggcaacaagagcgaaactctgtctcaaaaaaaaaaattgaatatttctgtattacgtgggtttatagtaatgtatttccatatgcatttttatagttttatcctgcatactattttaataatattaaagttattgcacagtgccttttagagtgttgagtatcgggacacacattctcacgttgtgtcactgattcttgctcatgggaaattgtttccaagtgtgtcttgtagttattttgaagcaatgaataaggaatattttcactttggtgtgaccatatggcttcacttgcaaaaggtaaccaaaagtgttcaattctgcttctggtaggttcatccaagtaggccttgtctctcataagtgtgagggttagtgtgttggtttcgtattttttctttcactatccttccatgaaatttctgggactgcctttggctttcaattcctaatattttaaaattgccgagaaacaattgtcctttgggggaagtaattggcttactttctctcctggcatagaggtaaggattctgttgctgaatcgctagagtttcagcacttcaagaatctcctgtgagtgaagagttcagtttctgcatctcacttcgccagtgtcaacgcttacacccgtccctgcctgagtgttgagtctctgggcctcaaaggaatccaactcatttctaactctgaccctccaaccatgcccaaagctcgtagtagcatggacttgagagggaacactcggaattccatttcactttcgtttacacgtcctggaggtttctttagttttgttgaaagttcacctttcattattatattgatgaaattagagttaattgtgttagacataattatgccaattataatgatggtgaaatttttcttttaatttcaggaaattctgcaggcagttatctctttctcttttggatatatattagttctttaatgaattgcactatgccttatttcgttctggctgaaactgaatttcccatcctggctgaatattatattagttagaccatgcctattaagaagtccattggtgtccgggcaccgtggctcacacttgtaatcccagcagtttgagaggccgaggtgggtgaatcacctgagatcaggagttggagaccatcctggccagcatggtgaaaccccatctctactaaaaatacaaaaattagctgggcgtgttggtgggtgcccgtaatcccagctgaggcacgagaattgcttgaacccagaaggcagaggtgccagtgagccgagattgtgccactgcactccagcctgggtgacagagtgagactctgtcttaaaaaaaaaaaaaagtctgttggcaaaatgttagaagttgcatcttatccacatgtaacaaatatgtagttagagacccttttgataaagcctattcacaagtattccctaaaagctcactcagaagataaaattgtttcttcagatatatttttctaattgcaggaatttattttcagaaggctttttttttttttagacggagtttcgctctgtcgcccaggctggagcgcagtggcgcgatctcggctcactgcaagctccgcctcccgggttcacaccattctcctgcctcagcctcccaagtagctgggactacaggcgcccgccaccacgcctggctaattttttgtatttttagtagagatggggtttcaccgtgtcggccaggatggtcttgatctcctgacctcgtgatccacccgtcttggcctcccaaagtgctgggattacaggcatgagtcgccacccccggcctattttcacaagttttttaaacaaactggaaattctcttgaaatgacttggaaactaaacaagaacctttttgaacattttatttgccaaaaagtagtaaccaaaataaatgatattttaatttcttttttattaaaagattttccgctagctttattaaaatataattgacgggtaaaaattgtacatattcaatgtgtttgaaacgataattcgattatacataggcattgtgaaaagattaccacaaccacattaacacgtcatcacaattacttaactttttgtgcttgcgtgggataagaacacttaaaatctactttcttcacaaattgtaagtaaactgtacagtattattaaatatggtcatctccttgtacatcagggcttcagaatttattcatcttattattgagagtttgtacccattgaccagcatcttttcatttcctcttctcccagcccgccacctctgtactctctgcttctatgagtttagctttttaaaaaaatattccatatacaagtgagatcacacaatatttgcctttttgtatgtggcttatttcactgagcaccacgtcctccagactcatccatgttgtcacaaatagcagaattttcttgtttcttatggttgagtaatattcaaatgacagttttataacttcatcatttcttctacatttattagctgacgttttaatagagggatgaattttactcacttgttcgtttatttttttctgtctgatttttaaaaattttcctttaagttattggggtacacaggtgatattaggtcacatgagtaagttctttggtggtgattggtgagattttggtgcacccatcactcgagcagtatacacggcaccgtatttgttgtattttgtccctcgcccccctccctctcttccccccaagtccccaaagtccattttatcattcttatgcctttgcatcctcatagcttagctcccacatatcagtgagaacatacgatgtttggttttccattcctgagttacttcacttagaataataatctcgaatctcatccaggttgctgcaaatgctgttaattcattcctttttgtggctgagtagtattccaccatataaataaaagtagaactaccatttgatcccgcaaccccactcctaggtatctacccagaggaaaagaagtcattatatgaaaaagacacttgtacacacctgtttatagctgcaccattcgcccctgcaaaattgtggaaccaacccagatgcccagcaatcacggaatggatgaagaaactgtggtatatttcacttgttcatttcaccagtattgattcattgattctcatttcattctcaaggttatgttattgtaaatatttagtttggtattcaaattggtccacattcggcaagtgggacccacttcaatttcattttcatttcaagatc[167 bp omitted]gcctcccgagtagctgggactacaggcgcccgccaaca[174 bp omitted]caggttcctctagtatttcccttgccccagccctgatttagctatttcttcaaggggtcttgatttctcttagtgtagaataatatttaaaattcaagatctaggtaccagttcactgacttttgataaaaatatatgcccacatactaccaacccagtcaagatatgagatgtgtccacattcctagaaagtgcgcattcttcaacagtcaatgtccctttctaatatatgaaaacatgtttggtgccaaagcttaaaactaatagtccataaaactgtgattcatcagtttattttaaaagctatttctactgcaggttaataagaaatacattacagaaatgcattgttgcttatgatcctaacactgtacgtgccattttgttctatttttaactttaactttacaaaattctgaaatctacatactgtgtttgttaaggactggaacgatagacataaaattcaaatgtgactgtggatgaatggataaagaaaatgtggcacatatacacaatgaaatactattcagcctttaaaaagaaggaaatcctgttatttgtaagaacacggatgaacctggagggtattctgggttttttcattagtctttccatttttttttgtttttgtgggtacagagtaggggtatatatttatggggtacatgagatattttggttcaggcttgccatgtgtaataatcacatcaaaatgtatagagtatccatcacctcaaggatttatcccttgtgttacaaacaatccaattatactcatttagtttatttttatttgtattttaagactgtctcactctgttgcccaggctggagtgcagtggcaccatctcagctcaccgcaacctctgcctcctgaattcaagcgactctcctgcctcagcctcctgagtagctgggattacaggtgcacaccacggtgcctggctaatttttgtatttttagtagaggcggggtttcaccatgttggccaggctggtcttgaagtcctgacctcaggtgattctcctgcctcagccttccaaaatgctgggattacaggtgtgagccaccgcgcccggcctcttttagttattttttaaatgtacattaagttattttttactatagtcaacaggttgtgctagccaatcctaagtcctattctttctattttttaataccaattaaccatccccacttccccgccaagtcccctctgctacgattcccagcctctggtaatcacccttctactctgtctccataagttcaattgctttaatttttagctcccacagataagtgggaagtttgtctttctgtgtctggcttatttcacttaacgactggaggacattatgttagatggaataagtcaggcacaaaaagacaaatatcccatggtctcacttatacgtgaaatctaaaagaaatttgatctcagaactagagagtagagtagtggttattagaggctgaggaaggtaggagaaagtaaggaaataagaagaggtgagttaatcaattgaggtcaagagttcgagaccatcctggccaacatggcgaaaccccttctctactaaaaatacaaaaattagccagacgtggtggtgggcgcctgtaatcccagctactcgggaggctgaggcaggagaatcacttaaacctgggaggtggaggttgtagtgagccgagatagcaccactgcactccagcctgggcaacagagtgagaccctatctaaaaaaaaaaaaaaattgacagaaggaaggaattcataataaatgtgggtttccacgttaagcaaaaacatttgtggtaacctctctatataccattagtaaaactcttatttctgcctaaattaaaatatgattggattaagaaggtgtggcctgatgtgattaaggtgggaagaggtaccctcttcaataaaagcctcttgcccatggatgtcactccaaaaccaaattatttcagaaggttcgaagccaaaaaaaaaaaaaaagccaaaaaaaaaaaaagccacaatggaagaaaggtaaatccaattttatataatttacatttctacaaagggcagagagagcaaagtccagggaactgggtaatttattaattcagcaagtgttgtgtgaagccgtgaagccaactccatgccaggtacagtgtgtgcactgagccctctgccctggcaggtattggcaggacttcaatttcaaaacccaggctggtgtactgacaagggccttcattttctttaatcaaatcatagcttcaaagactctgcaggacgctggtgagttgagtctcagccattaacttactcaatttctcaggtcccgttagtttttcccacagtcatattagacctgctgggggggagtcggagggtctttcagtctagaccagagctgttcataagaaatatactgtgacccatatatgtaatgataaattttctagatacactaaagaaaatggaaggcaacatgttgaattaattttaacatccgaaagatttgtcattttaaaatgtaaccaatattaaacagctatgaatgacgacctttttcatccaacatcatcacgatctagtgtgtgttttacactcacagtatgtctccattcagataaactccatctcagcgggttgctagccacatgctgttggtggccaccatattggacagcccgggtctagaccctttttaccacttcaactctatgtcgaataatgaacgatattcttcattccagctagcatgtgaaattcagaagtcagcagccatgactcttcacgtctgtacccgtattgcctggtacaagggatatcacatagtaggtacacaatccctaaagtgaaagaaccccagttcattcgtctcgtggaatctccacgaagaggcacattttccccccaggcagcagccacggctgaacattcgtgagaagcaagatgtcttaactgtctggcctgtctcgagaaacttgtattcttgagatgtagatccatcagctgcatcaattcactgaagaggaagccccaaagtggagggtgtatggtgccctttctgtaccgtggtcactcagaagaatgagatcaagatcaactgtcaaccggggaagccagcttccgagatcaaagaactagagccacacctgagatctgttctacagctgaaccaaggatgctgaagttccaaggtaaagtatctgccccacctagaccctccccacaaagggcctagggaaaaacaactgggcaaaagcctcttcacctaatattagaaggattctggctcctaacattgtatgcacctttgagcatcagtggttcttgcctctgagtatagaaccacctggagatttttaaggaaatggaatattcagctcatgccctagccctgtgctgtccaacagggtagggactagtggctctggaccacgagaaacgcagctggtacctagtggaaaggatgctattctgtacatatcgggttcaatgaaatatattactgaagttaatctcaccaggtcttttttatgtttttgaatgcagctactagtacatttacgagacatgcgggtcatgttatatttcttcaggcagcactggcctacaacttgaatatttgttaaattgtctgaggatcttattaaaatgtgcattctggtactacacctctgggatctcctgagactcaggatttctgacaagagcccagaaatttctgacaagagcagctgatgctgctggttcctgaaccatatgttgttttgggtttttttttccctcctttactaagttcttttttttcttttccttccaacttgtattttaggttcatgggggtacatgtgcagctttgtgacatgataaactgcatgcctcaggggtttggtgtacagacagtttcatcacccaggtaatgagcacagtacgtgagagggagttttttgattctcgccctcctcccaccctctaccctcgagttgcccccagtgtctttgttcccttctttatgtccatgtgacctcaatgcttagctctcacttctaagcgagaacacgtgatatttgctttcctgttcccgtgttatttcacttaggacagtggcctccacctggatccatgttactggagaagacatgatttcattctttgactgtgtagtattgcatggtgtatatgggccacattttctttatccagtccaccactcctggccatctaggttgattccatgtctttcctagcgtggatggtgttgtgacaaacatgtacgtgcatgtgtctttataatagaaaaataacaataatcaaaatttatacattacattggtacagattgtttgattctaattagatttttttttcaagttggagtctcactcactctgtcgtccaggctggagttcagcggcacaatctcggctcacagcaacctctgcttcctggattcacgtgattctcctgcatcagcctcccaagtagctggaattacaggtgtgtgccaccatgccgggctaatttttgaacgtttagtagagacgaggtttctccatgttggcgaggttggtgccgaactcctgacctcaagtgattcacccgcctcgtctccccaaaatgctgggatcacaggcaagacccgccgtgcctagccttgaattagattttaataacatttgtaaaaacaaaaagaattgaaaaacttctgccgaacctctgtagtgagttttcacttcagttattttactttatgcccctcaatttctaattagttcatttttaaaatttctatttggttattgatattttctattttgtgaggtgttactcttctaatttacttcagttctttgcctgttgtttcctttagttcttttggtcctccttcgacaagtaatttagtctgcagagaggaagcccaaggtcttgagcacatttatttcatcttgtgacttgtagacattcggttctctttgtgtgcctcatatattttttgttgaaaattggaagttttctgtggcagacgcagatcagattctcaaagttcacaggtttttttttttgttttgttatacttgcgggctgtagttttctgtttttgttttgttttgtttggacttaatgaaactattttgcaaaaattctgttttttctcctctgtgttctcagctcatcctgactgacacttctcctcacagaacttggtaaccagacgacccacatgagtgcttccttatatcctgggcaaaacacagaacctaaggaatcttgaagaaaaaaattcagagccacggttgagcaataacatgccctgcctggttctgagccacctcatccatgccccggctggactgacagtggggccacgtgctgggcagtggctcagggtgggaccacaatgtcctggttcacctcaaatccgtttgccgtaccaacactgacaatgagagaaaggaagacagtttcctttggaaactgagccaagccctgggttgtcagaaactctgagcttctcttcattgttaaagaagaaaatgtggcacatctacaccatggaatactatgcagccataaaaaaggatgacttcatgccctttgtaggcacatggatgaagctggaaacaatgattctcagcaaactatcagaagattggaaaaccaaacaccacatgttctcactcataagtgggagatgaacaatgagaacacatgggcacagggagaggaacatcacatactgggacctgtcggggggcggggggttaggggagggataacattagggagaaatatctaatgcaggtgacgggttgacgggtgcagcaagcccacatggcacatctatacctatgtaccaaacctgcacgttctgcacatgtaccccagaacttaaagtataattaaaaaaaaaaagaaaagtttgcttgtacagtgaacagggcctggggatcggaagccaccgaagccaaccatttacgtcagcttctgtgacacgcctgcagggacggggcatggagaatacagacctcgctgactgggatgttgaaggacaggtttttattcaaacacagaagacccctaaagtactgaactgtacatgagagtgggcaaggaaactttaccactgtctgaatagaagccagcggagctgctttctgtgaaaagatgcaattggaaaagatgtggaaagtatctaacacccaaaccaaccccaccagtgtgccagcaatcctaagacgctattctctaattctgaacggaagaactcctctcccaagacatgagcatgaatgcaattccaggctgtaagatattttgggagactattagagaggcaaatcaacccactgggcttggtgctttccacaactgaggccacctggtattcccaaagagaacagaaatttcgttcaagctttacgggaagcagataaaaattaaaagatgtgagggatcagtgctccaggaacatgggcccataaaattacaagctggagaataactgctcccagaaatgtgagtatattttaaaaggatttatatgagaaaataaagcaattagaattatgcaagaagagataagcattttctccctgcatgcatatgtgtagatacggtatgtgtgtatacatggacatacatgtggcagattatattataggtcccaatcaatgaagaaatgcaatgtgcaaggatttcatctaatatatgcaccacaacgtagagatttgtgtttctccatttgccttcatgagacaaaaggaattgagaactgccttggctttgaataggaaagaagagaatctagcaatcactagagaatgattactgtggagatgattaaattaaagactattaatttaatcacattaatgtaatcaaatcctttcccacctgacctccagtctcccacttttacattcttatccatgaactctgatcacctataatatatttaatacatgaggaacccgtttttgaacatttttaaagaggaaatgaatctcattttacttatgttgtgatgtaagggaaatagattgtaacagtaacgtttaactttcattttagatgctgcaactacaaagaaaaacggactttcactggctgactgattgtctggaaaccgttttgggatttctttcctaagcttcttaattagaatctttacattatagagaaaatgattttgagagttgagtgtggtctgtggagtgtcctattagtaacgacttctgagtaggtttaagtcacctcttttattgaaatgtgaaaaggtgtgacatttataatagaaaactctttgaaagtcgcaccgttcattttagaggaattttaaatgtcaccccaaattttacgattttaattaattttaattaatttccaaattttaaccaataggcataatattcaagatcttatctaaaaattattacatggcaatattttgtccttgttaattaaaaaataacactgaaaacacagtcgtcttcctttaaggtaaaaacctgtccaatagtaacaatctcaatgatggcagaatgaaatcagaatctgattggattaaaaaggagggaaagggtgtggctaaggtgggtggagacaccctctggtataaaagcccctggcaggcagctctcactccagatctgagctgtccgcagaagcagctggaggccaggggagaaactccagaaggagaggtgagttcaatcttatggaattcatttttacaaaaggcgtatgagagtctaggggaatgcaataatgtcttgattccacaagtgttgtctgaggccaaggccatgacagacacactgtatttctggaggataaggggacctcttccctggtaacagttaggtaagtcttagattttcaataccaaggcgagagacttgacaatctccatttgcttgaatttcgtgagaatttggtagactttctgaaatgatggacagaggttcggtggctgcgttactcaacgtcaggttttcctatgggtttggtattgttttcctattctccccttcccacaacccctggcaaccatcattcttctcttattttctgattttttttttgttcagttttttgttccttttaattcagaaagagaaagggaaggaaatgaaaagcaaagtttgtttacattactattgcggaaaagatctggccagatgctgggacccacctcttccaggatggggattcattatttctttaattgttttgagacagggtctcgctctgtctgccaggctggagtgcagtggctattttctgattctatgagatcagtcaactcagattccacataactgagatcatacagtgtttacttccctcagcctcacttatttcacttcccatcatgccctcggccttcatccacattggtgcaatgccagaattgccttcttttttatggtagaataatccaatgtatataccaccatttcctcatccatgtttctctcatagactctggggttgtttccatggctcttgtgaataacgctgcagagaacctaagagtgcagatgtctctttgacatgctgacttctttctttcacgtagaaacacggaagtagggttgctggaacacaggcagttctatccttcatgttttcagaaacctccctactattttctgtagtggttgtaccattttctttcccaccaaccgtgcacaagggttcccctttctccacatccttaccaacacttgtcttttgtctttttgatcatagccatcctagcagagaggggttaatatctcatcgcggttttgttgctggagggctcaggaggctctctggatgccagagagaccccagtcccagccagtttccaggttctggatgctgtcgggagaacgaattcagggatgagccagaatgaagtgaaaggcaagaagtttttattccagagcaaaagcacactgttaggagagaagtgtgggcgtgattctgaaagctggtggctttcgatggccttcggggtttctatttttgtcagtccttctaattaggaggtgaactaatcattaggttttctaggaaaaagcagagattttttagaattggtgaggtacccatttttgtactacatatgggcatgctggggtcagccgtgacactgcagaatgtgtgatttagtgtgataatgaccacggtcattactgtggcaatgctttgaaacagcttaactccctccggttttttatcacctcatgagcccaggttcctccttgtccttgtaattttaatgacaagtggctaattttaacagccactgttttggtcctatgtgaaaatgtcactggatacgttctcgattctcttgtgaccacacagtattcctgcctcagtttaaattgcatttctctgatggtgagtgaggttgagcttgttcctcagtacttgctggtcgttggtgtgtgcttttcagagaaatatctattcaggattctgcccattggaatttggattattttggcttttttttctttttgctacagccttgaaaatattccttatatattttggatattaatccattgtcatatatatggctgcttgtttgtttttcattagttctggtttttcctttttttttttttttccgctatgcagaagattcagttttacctggtacgacttatttgtattttgtgtcttgtccttttgttgcactatcagggttttcaccacatgcagtttgcacagttggggaagtagaaggtcttcaaatggactccagcactgtccaatagaaacataagataacccatatatgtaatggtaaattcagtttctggtagtcacataaaatagaacaaaacaagcctaatgaattttaactcaaaatataatatcgtttaacatgtgagcaactttaaacgttctcaagcagatagtttacgttctcttttccccattatgtcttcaaaaataagagcgtatttggctcacagcacatctccattcagatacaccccatttcaggtctcaatagccatttgtcactggtggctaccatatgaaacagttcaggtgtagactcctttactatttcaactcaaagtctttcggtgaatcatgccctttattccaatgagtattacagatattagaagttcagggcctcgagtcattgacatttgtattcatgttgtgtcttcgtcactagcagtagtgattttaagtgtcgtgctatgatagctccatgcatgtaaagataaaagccccaaacactatcagctgttcattcagctcgtggaaattctaattctgtgttcattttttttctatagacatttgccatggctgagcacttcaaacagatcattagatgtcctgtctgtctaaaagatcttgaagaagccgtgcaactgaaatgtggatatgcctgctgcctccagtgcctcaattcactccagaaggagcccgatggggaaggtttactgtgccgtttctgctctgtggtctctcagaaggatgacatcaagcccaagtacaagctgagggcgctggtttccatcatcaaggaactagagcccaagctgaaatctgttctaacaatgaacccaaggatgaggaagtttcaaggtaaggaatctataggacctgccacaacccataaaaggcactgggaaaatgtctttcaaacatttcttcattaaacataggcattagcaggatatctagcatctaaaacttccatgcttcacaaacaacagcagttctcacctttgcgtagagattttcatggaatctgtgcaagtttgtagaatactttggagagcaagctcctgtcttctttcttgtatcatatgtgctaaatggaaagctaattttcatcaaattatccactaacttatttcgaaaggcatttctaatatgaataaggtggacttgttacaatgatcatattcatgcaacctatagatacaatttaacctcatcaggtggccaaacaagtttccccaggaaattttgatttgggaaagaaagtagaataaaagtaaaagtgaataatgtgtttaagtgtttgcagtcaaagggcagagggagtctgtagtgtgtgtctttgctgaactcctggttcttctttgcacagtggatatgacgttcgatgtggacacagccaacaactatctcatcatttctgaagacctgaggagtttccgaagtggggatttgagccagaataggaaggagcaagctgagaggttcgacactgccctgtgcgtcctgggcacccctcgcttcacttccggccgccattactgggaggtggacgtgggcaccagccaagtgtgggatgtgggcgtgtgcaaggaatctgtgaaccgacaggggaagattgtgctttcttcagaacacggcttcttgactgtgggttgcagagaaggaaaggtctttgctgccagcactgtgcctatgactcctctctgggtgagtccccagttgcacagagtggggattttcctggatgtaggtatgaggtccattgccttttacaatgttagtgatgggtgccatatctacacattcatcgagattcctgtttgcgagccctggcgtccattttttgctcataaacgtggaagtcaagatgatcagagcatcctgagtatctgttctgtgatcaatccatccgctgccagtgccccagtttcttctgagggaaagtaaataaacatttgaacataatcatctttaggaagtttcagtgctcccatagccatagctaagaacttttccgctagatacacataggtacaaagggacagaagggaaagagccatcactctgtaaaccatgaacagaaagcaattatattaatgaggggaaaattacattgtacttaaagtttgtcatgttgttttctttggggcttatgtttatatttctgttcaataaatattttgaaaattcagattcatttgccaatcttttctattttctgcaagattagtttactatgtgttatggaagttatgaacgaaataataatttgaatgtgacccaacacagtaactgaatttcaaatgataaggacctatgaatacggcaaaattatatatgttcatgtattcagtttaacccaataactgaacactgacattcatttcaagtgcacactgagtgtttgccacgaatatgtgtggtcttagagagaactcgttagctttaaaattgaaatacaatacaccctctcctatgacggcaacagagtcaaattggaaatcaataacaggaagaaatccataaattctccacatatatgcaaattaaataaccacttctaaataaaatgatcaaatatgaaattacaatggaaattacagctatcctgagttgaatgaaaagcacacatttacaaaatttctagatgcggttgaagctcagtgagaaactcataataggaagaaaatatcgtaatcaatcaccttaatttctacttgaacttacttcactaagagcaattcaattgtcagcattttgatcaaaaccatctgacaagtatctgggaagttccagacattctcacatcttcctgtcttcttctgagccctgcaaacggttgcaacctctgcccgttacccagttccaaagtcgcttccacattttcaggtaccatagtagcagtgcctcactcctggtaccaatattctgtaacagttcattctcacactgctctaaagaactaccggagactgggtaatttatgaagaaaagaggtttcattaatttatagttctgcaggtcgcacggggaacatcactgggtggcctcgggaaatttaacaatcatggaggaaggcagaggggaagcgagtggctttttcacatagtgacaggaaagagagaaagaggaaagtgccatccactttgaaatcatcagatcttgtgagaactcactcacggtcatgggaatagcgtggaggaaatccgtccccgtgatccaatcatctcccacctggtccctcccccaacactgaggatgacaattcaacatgagatttggctggggacacagagccaaaccgtatcacttgatatgatcccacagaatactattcattttcattcagtcttttatttcttaacaaatggtggtaaagtatatataattgaccatcttaaccatttttaagtgtaaaattcaatggtatttatgatgtccatattattttgccaccatcactgccattcatctccagaaatcttttcatcttccaaaattgaaactgtatagccatcctagccctcttttaaattcatctatttgttgtctcgcctgagtgccttatgtattctggatgttaaccccttatcggatgtatggtttgcaaatatcttctcccactgtgtagattgtctcttcaccttattgtttcctttgttgtgcagcagcttttacatgtgatgcgatcccacttgtctctgtttgtttttgttgcctgtgatttaggtggttatatcaaaaaacaagtttgcccagacaaatttcttagatctttccccctgtgttttgatctgataggtttaccatttcaggtctttcatttaactcttttctccgttttgagttgattcatgcatgcagtttgatgtaaagatacaattgccttcttctatatgtggatgagttcttcgagcacaatttattgaaggggctgtactttccccatttcgtattgtggatcctttgtcaaaaatcaatttgccacatgtgcgcgggtttatatgggaggtttcattcctgtttcattggtagaaacggctgtttttattctagtagcatgtcgttttgattatactagttttataatatattttgaaatcaagtagtgtgatgtctacagctgtgagatttttctgcatatgattgttttagctatttggggtcttttgtggcttcacccaaattttaggacttttttctctttttctgtgaaaaatgagaattgtgattgggattgcattgaatgtgcggatccttttgagtgtatagacattttaacaatattaattctaatccgtgaacatgagatatccttttatttgtgtttttgtcaattttgttcattgctattttatactttttattgtacaggtctttctccttctttactgaatttactcttgggtttgattttcttattgttattttaattggaattattattatgatatttggagagagagtctctctctgttttcctggctggagtgcagtgcaacgatctcagctcactgcagactcctgcctcaggcccccaagtagctgagattacaggtagcagtcaccatgcccagctgatttttgtctctttggtagagatagagtttcaccattttggccaggctggtctcgaattcctgaccacaagtgatctgcccactttggcctcccaatatgctgggattacaggtgtgagccaccatacctggcccggaattattttttattttcttttttagatggtttatttacaattcataaaaatgctaagaatttttgtttgttgattttgtgtcttgcaccttcactgaattcatttatcagtcctaacagaatttgttggagtttttagggttttctctatataagatggtgtcatcggcagtgacaatttcacttgccttgaattagattttaataacatttataaaaacaaaaaaggtggaaaaacttctgtcgaatctctgtagtgagttttcatttcagttattttcctttatgcccctcaatttctaattagttcatttttaaaatttctatttggttattgatattttctattttgtgaggtgttactcttctaatttacttcagttctttgtctgttgtttcctttagttcttttggtcctccttcgacaagtaatttagtctgtagagaggaagcccaaggtcttgagcacatttatttcatcttgtgacttgtagacattcggttctctttgtgtgcctcatttattttgttgtaaattggaagtgttctgtggcagatgcagatcagattctcaaagttcacaggttttttattgttatacttgtgggctgtggttttctgtttttgttttgttttgtttggacttaatgaaagtattttgcaagagttccgttttttctcctctgtggtctcaggtcatcctgactgacacttctcctcacagaacttggtgactagacgacccacgtgagtgcttccttatatcctggacaaaacacagaacctaaggaatcatgaagaaaaaaattcagagccacggttgggcaataacatgacctgcctggttctgagccacctcatccatgtcccggctggactgacggtggggccacgtgctgggcagtggctcagggtgagaccacaatgtccgggttcacctcaaatccgtttgccgtaccaacactgacaatgagagaaaggatgacagtttcctttggaaactgagccaagccctgggttgtgagaaactctgagcttctcttcattgttaaagaagaaaatgtggcacatctacaccatggaatactatgcagccataaaaaaggatgactttatgttttctgcagggacgtggatgaagctggaaaccatgattctcagcaaactatcacaagattggaaaaccaaacacggcatgttctcactcataagtaggagctgaacaatgagaacacatgggcacagggagaggaacatcacacactgggacctgtcggggggcggggggttaggggagggatagcattagggagaaatatctaatgcaggtgatgggttgatgggtgcagcaagcccacatggcacatctatacctatgtaccaaacctgcacgttctgcacatgtaccccagaacttaaagtataattaaaaaaaaagaaaaagaaaagtctgcttgtacagtgaacagggcctggggatcggaagccaccgaagccaaccatttacgtctgcttctgtgacacacctgcagggacggggcatggagaatacagccctcgctgactgggatgttgaaggacaggtttattcaaacacagaaaaccctcaaagtactgaactgtacatgagagcgggcaaggaaactttaccactgtctgaatagaagccagcggagctgctttctgtgaaaagatgcaattggaaaagatgtggaaagtatctaacagccaaaccaaccccaccagtgtgccagcaatcctaagacgctattctctaattctaaacggaagaactcctctcccaagacatgagcatgaatgcaattccaggctgtaagatattttgggagaatattagagaggcaaatcaacccactgggctcggtgctttccacaactgaggccacctggtattcccaaagagaacataaattttgttcaagctttacggaaagcagataaaaattaaaagatgtgagggatcagtgctccaggaacatgggcccataaaattacaagctggagaataactgctcccagaaatgtgagtatattttaaaaggatttatatgagaaaataaagcaattagaattatgcaagaagagataagcattttctccctgcatgcatatgtgtagatacggtatgtgtgtatacatggacatacatgtggcagattatattataggtcccaatcaatgaagaaatgcagtgtgcaaggatttcatctaatatatgcaccacaacgtagagatttgtgtttctccatttgccttcatgagacaaaaggaattgagaactgccttggctttgaataggaaagaagagaatctagcaatcgctagagaatgattactgtggagatgattaaattaaagactattaatttaatcacattaatgtaatcaaatcctttcccacctgacctccagtctcccacttttacattcttatccatgaactctgatcacctataatatatttaatacatgaggaacccgtttttgaacatttttaaagaggaaatgaatctcattttacttatgttgtgatgtaagggaaatagattgtaacagtaacttttaactttcattttagatgctgcaactaaaaagaaaaacggactttcactggctgactgattgtctggaaaccgttttgggatttctttcctaagcttcttaattagaatctttacattatagagaaaatgattttgagagttgagtgtggtctgtggagtgtcctattagtaacgacttctgagtaggtttaactcacctcttttattgaaatgtgaaaaggtgtgacatttataatagaaaactctttgaaagtcgcaccgttcattttagaggaattttaaatgtcaccccaaattttacgattttaattaattttaattaatttccaaattttaaccaataggcataatattcaagatcttatctaaaaattattacatggcaatattttgtccttgttaattaaaaaataacactgaaaacacagtcgtcttcctttacggtaaaaacctgtccaatagtaacaatctcaatgatggcagaatgaaatcagaatctgattagattaaaaaggagggaaagggtgtggctaaggtgggtggagagaccctctcgtataaaagcccatggcaggcagctctcactccagatctgagctgtccgcagaagcagctggaggccaggggagaaactccagaaggagaggtgagttcaatcttatggaattcatttttacaaaaggcgtatgagaatctaggggaatgcaataatgtcttgattccacaagtgttgtctgaggccaactccatgacagacacactgtatttctggaggatattgggacctctgccctggtaacggttaggcaactcttagattttcaataccaaggcaagagacttgacaatctccatttgcttgaatttcatcagaatttggtagactttctgaaatgatggacagaggttcggtggctgcgttactcaacgtcaggttttcctatgggtttggtattgttttcctattctccccttcccacaacccctggcaaccatcattcttctcttattttctgattttttttttgttcagttttttgttccttttaattcagaaggagaaagggaaggaaatgaaaagcaacgtttgtttaaattactattgtggaaaagatctggccagatgctgggacccacctcttccaggatggggattcattatttctttaattgttttgagacagggtctcgctctgtctgccaggctggagtgcagtggctattttctgattctatgagatcagtcaactcagattccacataactgagatcatacagtgtttacttccctcagcctcacttatttcacttcccatcatgccctcggccttcatccacattggtgcaatgccagaattgccttcttttttatggtagaataatccaatgtatatatcaccatttcctcatctatttttctctcacagacgctggggttgtttccatggctgttgtgaataatgctgcagagaacctaagagtgcagatatctctttgatatgctgacctctttctttcacatagaaacacagaagtagggttgctggaacacaggcagttctattcttcatgttttcagaaacctccctactattttctgtagtggttgtaccaattttctttcccaccaaccgtgcacaagggttcccctttctccacatccttaccaacacttatcttttgtctttttgatcatagccatcctagcagagagggggtaatatctcatcgcggttttattgctggagggctcaggaggctctctggatgccagagagaacccagtcccagccagtttccaggttctggatgctgtcgggagaacgaattcagggatgagccagaatgaagtgaaaggcaagaagtttctattccagagcaaaagcacactgttaggagagaagtgtgggcgtgattctgaaagctggtggcgttcaaaggagtttggggtttctatttttgtcagtccttctaattaggaggtgaactaatcattaggttttgtaggaaaaaagcagagattttttagaattggtgaggtacccatttttgtactacatatgggcatgctggggtcagccgtgacactgcagagtgtgtgatttagtgtggtaatgaccacggtcattactgtggcaatgctttgaaacagcttaactccctccggttttttagcacctcatgagcccaggttcctccttgtccttgtaattttaatgacaagtggctaattttaaaagccactgttttggtctcatgtgaaattgtcactggatacgttctcgattctcttgcgaccacacagtattcctgcctcagtttaaattgcatttctcagatggtgagtgaggttgagcttgttcctcagtacttgctggtcgttggtgtgtgcttttcagagaaatgtctattcaggattctgcccattggaatttggattattttggcttttttttctttttgctacggccttgaaaatattccttatatattttggatattaatccattgtcatatatatggctgcttgtttggtttcttttagttctgttttttgtttttttttttttttttttccgctatgcagaagattcagttttacctggtacgacttatttgtattttgtgtcttgtccttttggtgtgctatcagggttttcaccacatgcagtttgcacagttggggaagtagaaggtcttcaaatggactccagcactgtccaatagaatcttaagataacccatatatgtaattgtaaattcattttctggtagtcacataaaatagaacaaaacaagcctaatgaattttaactcagaatataatcatttaagatgtgagcaacttgaaaccttctcaagcagatagtttacattctcttttccccattacgtcttcacaaagaggagtgtatttggctcacagcacatctccattcagatacgccccatttcaggtctcaatagccatttgtcactggtggctaccatatgaaacagcccaggtgtagactcctttactatttcaactcaaagtctttcggtgaatcatgccctttattccaatgagtattacagatattagaagttcagggcctcgagtcattgacatttgtattcatgttgtgtcttcatcactagcagtagtgatttaaagtatggtgccatgatagctccatgcatgtaaagataaaagccccaaacactatcagctgttcattcagctcgtggaaattctaattccgtgttcatttttttttctacagacatttgccatggctgagcacttcaaacagatcattagatgtcctgtctgtctaaaagatcttgaagaagccgtgcaactgaaatgtggatatgcctgctgcctccagtgcctcaattcactccagaaggagcccgatggggaaggtttactgtgccgtttctgctctgtggtctctcagaaggatgacatcaagcccaagtacaagctgagggcgctggtttccatcatcaaggaactagagcccaagctgaaatctgttctaacaatgaacccaaggatgaggaagtttcaaggtaaggaatctataggacctgccacaacccataaaaggcactgggaaaacgactttcaaacatttcttcattaaacataggcattagcaggatatctagcatctaaaacttccatgcttcacaaacaacagcagttctcacctttgcgtagagattttcatggaatctgtgcaagtttgtagaatactttggagagcaagctactgtcttctttcatgtatcatatgtgctaaatggaaaactaattttcatcaaattatccactaacttatttcgaaaggcatttctaatatgaataaggtggacttgttacaatgatcatattcatgcaacctatagatacaatttaacctcatcaggtggccaaacaagtttccccaggaaattttgatttgggaaagaaagtagaataaaagtaaaagtgaataatgtgtttaagtgtttgcagtcaaagggcagagggagtctgtagtgtgtgtctttgctgaactcctggttcttctttgcacagtggatatgaccttcgatgtggacacagccaacaactatctcatcatttctgaagacctgaggagtttccgaagtggggatttgagccagaataggaaggagcaagctgagaggttcgacactgccctgtgcgtcctgggcacccctcgcttcacttccggccgccattactgggaggtggacgtgggcaccagccaagtgtgggatgtgggcgtgtgcaaggaatctgtcaaccgacaggggaagattgagctttcttcagaacacggcttcttgactgtgggttgcagagaaggaaaggtctttgctgccagcactgtgcctatgactcctctctgggtgagtccccagttgcacagagtggggattttcctggatgtaggtatgaggtccattgccttttacaatgttagtgatgggtgccatatcaacacattcatcgagattcctgtttgcgagccctggcgtccattttttgctcataaacgtggaagtcaagatgatcagagcatcctgagtatctgttctgtgatcaatccatccactgccagtgccccagtttcttctgagggaaagtaaataaacatttgaacataatcatctttaggaagtttcagtgcccccatagccatagctaagaacttttccgctagatacacataggtacaaagggacagaagggaaagagccatcactctgtaaaccatgaacagaaagcaattatattaatgaggggaaaattacattgtacttaaagtttgtcatgttgttttctttggggcttatgtttatatttctgttcaataaatattttgaaaattcagattcatttgccaatcttttctatttgctgcaagattagtgtactgtgtgttatggaagttatgaacgaaataataatttgaatgtgacccaacacagtaactgaatttcaaatgataaggacctatgaatacggcaaaattatatatgttcatgtattcagtttaacccaataactgaacactgacattcatttcaagtgcacactgagtgtttgccacgaatatgtgtggtcttagagagaactcgttagctttaaaattgaaatacaatacaccctctcctatgacggcaacagagtcaaattggaaatcaataacaggaagaaatccataaattctccacatatatgcaaattaaataaccacttctaaataaaatgatcaaatatgaaattacaatggaaattacagctatcctgagttgaatgaaaagcacacatttacaaaatttctagatgcggttgaagctcagtgagaaactcataataggaagaaaatatcgtaatcaatcaccttaatttctacttgaacttacttcactaagagcaattcaattgtcagcattttgatcaaaaccatctgacaagtatctgggaagttgcagacattctcacatcttcctgtcttcttctgagccctgcaaacggttgcaacctctgcccgttacccagttccaaagtcgcttccacattttcaggtaccatagtagcagtgcctcactcctggtaccaatattctgtaacagttcattctcacactgctctaaagaactaccggagactgggtaatttatgaagaaaagaggtttcattaatttatagttctgcaggtcgcacggggaacatcactgggtggcctcgggaaatttaacaatcatggaggaaggcagaggggaagcgagtggctttttcacatagtgacaggaaagagagaaagaggaaagtgccatacactttgaaatcatcagatctttgagaactcactcacggtcatgggaatagcgcggaggaaatccgtccccgtgatccaatcatctcccacctggtccctcccccaacactgaggatgacaattcaacatgaggtttggctggggacacagagccaaaccgtatcacttgatatgatcccacagaatactattcattttcattcagtcttttatttcttaacaaatggtggtaaagtatatataattgaccatcttaaccatttttaagtgtaaaattcaatggtatttatgatgtccatattattttgccaccatcactgccattcatctccagaaatcttttcatcttccaaaattgaaactatatacccatcctagcccactttttaattcacctatttgttgtcttgcctgagtgccttatgtattctggatattaaccccttatcggatgtatggtttgcaaatatcttctcccactgtgtagattgtctcttcaacttattgtttcctttgttgtgcagcagcttttacatgtgatgcgatcccacttgtctatgtttgcttttgttgcctgtgatttaggtggttatatcaaaaaacaagtttgcccagacaaatttcttagatctttccccctgtgttttgatctgatagttttaccatttcaggtctttcatttacaatcaccattttaattccactctctaattttatgacttcagtgtttttaggttcctagtaagttaggtcattcggtatttatcgctttctatatgacttattccacttagcaaaatgccctcaagtttcatccatttttttatggtgtacgatatttcattgtatatatagcacaatttcttgatctattcttctgccaacattatcgagtaaaagggattcgctgtccaatactctaggagtgaataggatgacatggggatgtttgagaaaaggaaagcattgcattgaaatgaaaaccctagggagacaggagtccagctctaatctgtcgtctcatactggcttcatgtcagcatttattagaaaaggttcagagggcctggcatggtgtctcatgcctaaaatcccagcaatttgggaggcagatgcaggtggatcacttgagctcaggagtaggagaccagcctgggcaacgcagtgagacccccccctctccaaaaccacaaaaatgagctgcacatggtggtgcaggcctgtagttccagctactcggggaggctgaggcaggaggatcatctgagcccgggagtttcaggctgcagtgagccgagatcgaaccactgcactccagcctgggtgattaaaaaaggttcaggggatggattctgagatcagtaagtaattgatggaaggaaaagggaggtctggaaagtccatgggcatgggcagttatcttttcgtgctttcttgtgggtcgactgtggaaattcaaagggtgttaatgtacaacatgcagtggaaattcgggctgtgacttcagcaagcttgttctgcacagactccagctggccacattggctctagccaatttcagccagttcttttgtttcctgaacagagggagtttcagtgtttcagcaaagttgtttcttttctttgttttctttttctttttttggggggagacagggtcttgctgctgcctgggctggatgcagtggtgcgatcttggctcactgcagcctctatctcctgggctcacgtgatcctcccgtatcagcctcccgagtagctgggaccacaggtatgggccaccacacccggctaatttttaaaattatttgtagacacgggtctcacgatgttgcgctggctggtctcgaactcctgggcccaaacgatcctcctttctcagcctcagaaagtgctggaatttacaagtgtgagccaccgcgaccagccaagttttttcccttcttacctgccatgctgtacactcaaaaatttgttagttactggtttaactcttttatttttatttatttattgttttagacgaagtctcgctctgtcaccaggctggggtgcagtggcatgatctcgcctttgcccatttcataatcagaatgttagttttaggggttttttttttctattgcgttatgagttctttatatattttggatattaacctaatatcagatatataatttgcaaacatttttttccattctgtaggctttcttttcatcgtctcccttgtttccttcactatgcagaacattttttgtttgacatagtccaacttatttatttttgttttttgtgtaatataatgctgtaagtttcatgccacatccaggtggaacaaatactatgccacgggagtttttgagaaaagaaaagctttatgttaattcaactcccagggagacaggagtccagctctaatctgtcgtctcatactggcttcaaatcaccatttattagaaaaggttcagaggacctggcatggtggcacctgcctgaaatcccagcactttgggcggctgaggcaggtggatcatttgaggtcagtagtaggagatcagcctgggcaacatagtgagacctcatctctccaaaacacaaaaattggccaggcttattgtggaggttgagggtctccagtgctgtccaatataaacataatgtgatcaacatatgtaagataaatttattgtctaatagccacataaatcaagcaaaatgaaataagcctaagtaagtttaacaaaatataagcatttcacatgtaatacatttttaagattctctaacagatagtttacatctcccttaggtcttcaaaatttagtgtatattttatactcacaacacatcttcatttagataagccccatttcaggtgctcagtagccacatgtggctggtggctaccatattggatagctcagctgtagacccttttgccactcaactcaaagcctcataccaagccatggccttcattctagccagtatttccaatattggaaggtcagggccctgatcatttatatttgtacttatattgtatcttcatttcctagtaccagtgctttacaaagagtaggcgatgatgtcttcatgcaggtaaagatgaaagtgtcccaagaactatcagccattccactcacgtaaaagctaataccatgcctatttactcccagacagtggccatggctgaacactttaaacaagcaagcagttgtcctatctgcctggattatcttgaaaaccccacgcacctgaaatgtggatacatctgttgcctccgatgcatgaactcactgcgaaaggggcccgatgggaagggggtgctgtgccctttctgccctgtggtctctcagaaaaatgacatcaggcccgctgcccagctgggggcgctggtgtccaagatcaaggaactagagcccaaggtgagagctgttctgcagatgaatccaaggatgagaaagttccaaggtaaggaatctgtactacctgctccaagcccataaagggccttggaaaaagcagcttttaaatgtctttccgttcaatacgggcattagctgaagtctgcaacctaaaagatttgtgatcccaaacatcagctgttatcagcgcacagtatagattttcacaggatctgtaccaatttatgagagcaaactatcatctcctccttcatccatcctatgcaccaagagggagaaaaacctttaatcaaaatattgaataacttaaacaagaattttactatgagaaaggtgggcttgttgcaattatattcatacattctatacataaaatttgacttaatcggggggccagggaaattcctaaagaaagttcggatctgagaatgaacgtggaataaaagaagtgacaatgaataaaatatttgggtctgtgcagtagaaaggcagagggagtctgtagtgtgtgtctttgctgaactaccggttcttctttgcacagtggatatgaccttggatgtggacacagccaacaacgatctcatcgtttctgaagacctgaggcgtgtccgatgtgggaatttcagacagaataggaaggagcaagctgagaggttcgacactgccctgtgcgtcctgggcacccctcgcttcacttccggccgccattactgggaggtgggcgtgggcaccagccaagtgtgggatgtgggcgtgtgcaaggaatctgtgaaccgacaggggaacgttgtactctcttcagaactcggcttctggactgtgggtttgagacaaggacagatctactttgccagcactaagcctgtgacgggtctctgggtgagctcaggtctacaccgagtggggatttacctggatataaaaacgagggccatttccttctataatgtcagtgataggtcacatatcttcacattcacgaaaatttctgctactgagccactgcgcccatgttttgctcatgcagatacaagtcgtgatgatcacggatacttgagtgtgtgtgtgtaattaataatggcattgccagttccccaatttatcctgggcaaggcaactatacacttgaacacagaaaacatccacagtaagtggctgtgtgctcgtgaccaaaggcgagaacttctccgcttggtccacttatggttcaaagttatggaagaagaatgtgggtctttcaaggaattctgagctctacttgtattgctgatgaaaaattgcatatgaaatataaagcagtgtcattttttggtaactcatgcttatgtttctttcacaataaacgtttaacattttcagatgaatttgcaaatgtttttcttttgctttgctgtaagatcaagtaaatgtgttatggaggttataaactataataatataaattgacccccaaaattaattcacttactaaatgacaaggaaacactgcctgttaaactgataaaagtatctgcctgtatttgttcagttttacccaacaactggaaaacacacattcatctccagtatacattgaacattcgctagcatagacagatgtggccataagacaaatcacattgacatgaaaattgaaataatatacacgctgttctcaaatgccaacagaattaaattataaatcagtaacaagaagaaatctgtaaaatctccacatacatgaaaattaaacaaccactttaaaataaaacacaaatcaaaggtgaacttataaaggaaattataaaataccttacactgagtgaaagtaaatgcacaatatcacaaaatgtgcagatgtagttgaggtttagagggaaatttatagaaa[175 bp omitted]gcctcccaagtagctgggaccacaggcgcccgccactacgtctggt[138 bp omitted]cccggccggtctagcttccatttttaagtgagcaaatgcagtggcaaattaggtaaaaaacaaaacaaaacaaagactacagtagtagtcaatgaaatagaaaatggataaatgttaaataaaattttaaaaattcaagacacgttttttcaggatcaaagtagtaaatcttcagctacagtgaaggagtgaggaaggggtgaattaaaacaatgagtaagcaagagaaaaggaagacagggcaaaatcaagagaggcagagaaagaagagacagagcccatcgtgatggctcaagcctgtaatcccagcacttcgggaggccgagaagggaggattgcttggactcaggagtttgagaccagcctaggcaacaaagcaaaaccccatctctacaaaaataataataaaaaaattagctgggtgtgttggtttgcacctgtggtttcagccacttaggaggctgaggtgggaggattgcttgagccccaggaagttgaggctgcagggagccatgagccatgatcatgccactgcactccagcctgggctacagagtgagaccctatcttcaaaaacagaaaagaaaatgtaacatatatacacaatggaatagtattatccatagaaaagaagaaagttctgtcatttgcatctacagaaatgaacctggaatacactatgcttagtgaaacatacagccacagaaagagagatatcacgtgatctcattcacttggagaatttta[206 bp omitted]gctgaggcaagagaatcgcttgaacccgggaggtggaggttacagtgagctgagattgcaccattgcactccagcctggggtacagagtgaaattccgtctcaaaaaaagaaggaaaaaaaagaactagagagcaaaatggggttaccaggggccggggctggggctggggctggggctggggcagtgaggtgggagggttagggaatggttggccaagatacacacaatttcagctagacaggagaaataaatacaacatggcaacaatagttaataataatattcttgaaaaatgctaagggaggcaattttcagtgttttcataaaaaacatgacaacttttcgaggaaatgcatatattacctaactagatttacccgtttggtaacgcatctacattgcaaaacaccatgacatacacaatcattacatacaattattctgataatttaaacaaaacaagaatcaaactttacatgctcaagatgttccgttttacctcagtgagatctcaaaaaaattttttaataaaaaatagttctgttgaaactctcttgtgaattttcctttcagttgttgtactttattgcccctaaattgctcactggttccttcttaaactttctctttattcatgttctctatttgatgaggagttattcctctggtttatttttgttcttctgcccttgattttcttgagttctttgcacatatttaagataattaatttagtatttggagaggaagcccaatgtcttggcttgctcatatgctattttttcttacgactattatactgtcttgtgtgtgtgcctcattgttttggtaagaaaaagtggacactgtgtgtggcaaaccctggacatcaaattctcacccctgagcaggctttcttgttgctgctggttgtgagttggagtcttctgtttttgttttcattttttgttttgtttgaacctttgtaaactactgtgtaaaggtttcactttctcctgtgtggccactgaagtctctgccttctggtctactaacaatttgatggagatttttaaaacatgcctgaacgcaaacccaaaattctctcaagctctttgccatgggatccctctagggagcttagccaggattttgatttttttttttttttttagacggagtctagctctgtcgcccaggctggagggcagtggcgcgatctcggctcactgcaacctccacctcccaggttcactagccaggatttttacaactctcatttcagccttcatttcctgcttgcatggagcctcgggatcatcagaggtaaaacatagggtttctcagatttttataatcttgcatggacatgtatgattgaactcaatccttggtatacctcagtgctattcaaagcccttactatctcatgtaattctccccccagactcttccttaataggcttttcattctgtcatctgttttccctgttatccctcacccaggcaacttcagcaagtgtatttgtctttaagtgcttttaatgacactggcaccccccaataaatcagcttcagtctgtgtagatctaaaaagggtgaaataaaggcaagcccttgagccaacccttcaaggaaccactaagatagatggaggcacacaaccacaattctttgagaacaaagattcttcatcctgtggcatcagcgtgctggcctgggaatgagggactccatgttctcagcagccatcaagctgcagagtggggaagagtaggtgggtgagtcaaattaccacaactcagctgggtgcagtggctcacgcctgtaatccccgcgctttaggaggccgaaacgggcggatcaccaggtcaggagatccagaccaccctggccaacatggtgaaaccccatctccactaaagatacaaaaattagctgggcgtggtggtgggtgcctgtaatcccagctactcgggaggctgaggcaggagaatcgcttgaacccggaagaaggggcttgcagtgagtcgagatcatgccactgcactctggcctggtgatagaacaagattccacaaaaaaaaaaaaaaaaaaaaagccacaactctcttcctgaaattaagcagcttcttccttcactcacggttcccctggaggttgtaaattattagattcaaattttccacaaaggctgattttgacagttatttcccagtttaatttttgttttaccaaagactacttttaaaattccctaccttgaaacttgcagtgagatcactccattaattttaaacagaattttaaaattctgatattattgctctatatgctctaaatagggcttttgtctatttgtaggaatgcttcctctcagtgcaaattatctagaataaagaagggaagtctgtttctccaaggagaggcacaggaggcagggctatataggtaacctggatgacaaattacaatatgccatggagtatgtggacattgaagatatgcaatattgaggtgggaagatggcttcaatgacttcagaattttcagtcatgggaaaacaagaggtttccttaaattgtgatagcctggccgggtgcagtggctcacacctgtaatcccagcactttcagaggctgagttggacggatcactcaagaccagcctaggcaatatggtgagaccccttctctactaaaagtacaaaaaattaggggggtatggttgcatgcatctgtggtctcagctactggggaggttgaggtgggagaatcacttgagctcaggaagtcgaggctgcagtgagttgtgatcgtgccactgcatgccagcctgggcgacagagtgagatcctgtctcaaaaaaaaattatcttattttagaaacatgtcagaaaaatcaaagaacaagcccagttgaaactacagtaagatcctttgattcaccttcaaggtttctttccacagctgattatgacttgattctgaaatcagagttttgaaaaggaacatagaaaacacttttagccagttattctgctaatcatcagaatcttcacatcatgtccagaagttgcatttatcagaagtggctgaggaggttttgcattgggaatcaaatattctcatcagagaagccccagactcactgaggcaatgtcactgagagatactacagatgacatgatcgtgacatctctgtggggagatcaggtccaggagcctgtctctaactaaggactcaggtgccccagcttatggtgactgacacatccctgtacagagcttgttgccaagaccaccccagtgagtgcttctgtacatttagagcaaaaggcagaacataaagatctcaaacaggagaagagctcagagctgagggtgagcaatagcattgggcaaaataggtttacccctgcctggctctgagccacaccatccatgccccggctggaccaagacagtggcacattaagccaggtgcttggcttgagctcctggctcaatgtgggaccagaaagctcaggtttactgtatacccctgtgtcctagaaacactgtcaaagggagaaattaggacagttctccttagaaactgagccaaggatcacttgaggtcaggcgatccagaccaccctggccaacatggtgaaaccccatttccactaaaaatacaaaaattagctgggcatggtggtgggcgcctgtagtcccagctactcaggaggctgaggcaggagaatcacttgaacccgggaggcagaaggctgcagtgagctgagatcacaccactgcactccagcctgggcagcagagcgagactccatctcaaacaaaaaaaaaaaaatttttttttcagcacgtaaagaccctaaaacctacccaccttgagtaggtatcctctcacctatggaggcctattaggtacagcaaccagatgcttagcaatggggcattgtaaatacagtgtcagggttggaaacattatcagaggatgcccagttcaactccctcttctgaaagaaggtgaaaaggagacgctttttctgaggccacacatatctgacatttctccacagcttagagaagtcacccttcatcccatggaacacacacaagtttgtgagcggagctggctaagagcaggggagatacggaaatgaatgccagttacggtgttaggtagatccgggaagaacatggtgcagcaggaatacgaagtcaggagggaaggtgagatgaggatttcatttcgaaggattcctagggacaccttctaacaactctccctagaccaaaacaaaaacaaaaacaaaaacaaaaacaaaacccagaaaaacaaaaacaagaaacaaaccatgaaaggatcatagtttctttagtgttactccaccgtgcccactgatgaaacaatcatgcttcacagctttttccaatgcattttatcctttattacttcatataatccttttaatactcttgagacagtgtaggaatttgaagtggttgactggatcaaggtcacacacacacacacacacacacacacacacacacacacacacacatcaaataggaaaattatagtcctaattctcttgcatcccagtcacggtagtaatttataataaatactgtttacgtacaacatgatcaaaggggttgcctagatgctgtatttgacgttctcatggctgcagacattctgggaaatttgaaaaacatgtaatccaaattagaattaggtattattgaacctggctgagaagcaggtgtcacaccaatttctctgccttcctttaaagaccaagtttcagacagaaagatcaaactgggttttctttcctttacagtcatcagcaactgctgggtttgtgtgttcaggccagttaatggaagcctgaaggaaaacagagagagaacgccgttaatgctacatgtgaggtctcagctttgttgcatcaatgactaattccccatatggcatcctttgggtattcttgggagtatctcaagccatctctgaggaaacaaaaatctgttccagactgaaaaccgtgagatagcgatttctccattaaatattagaatgtaagacaagatttccactgggagaactgtttgaagtaatattagtagtaaccaacgccactacgtgctcaatgctttacatgcatctcacattacatcctcacaatgggtaatggcattcaagactttataggttccaatactgagggtcaaagtttccaactaaaatatgtttacaggctggacgcagtccagtcccacgtctaatcccagcactttgggaggctgaggcaggcagatcacttgagctcaggagtttgagaccagcctggacaacatgccaaaaccccatctctaccaaagatacaaaaacttagccgggtgtggtggtgcgtgcctgtggtcccagctatttgggaggctgaggtggattacttgcacctgggaggtcaaggctgcagtgagccatgatcacaccactgctctccagcctgagtgacagagcaagaccctaactagaaaaaaaaaaaatttacatagctagagaacagaggcacacttacaccgcagcccatgctcatgtttctttctccaaatcaaagaggaggattcagccacttattttgtgccctctctgcatgtgagtgtcccaattagcatgtaggcacaaatacctttataacctgaaatatggtcatttctgcagtttagttttttttgagcacctataatactgaaggaaaaatatccctggcatcatggagctcatgttctagtggaaggaattagataatagaataaatacattatacatttgaaggtgagaagagccctggggaggaaaaataaagagaataagcaatttggaaaatttgtaatgtttatgggtttttctatgcatctgaaagtttgactcaatatccatatttatgaaaaaattatcacttagagatgacaagggaaaacaactcatagtagggtctccagcatagagtctgtgatctcatttaatctttaagagttctgagataattatcaccattttccatttgagaaaaattggacatgagtgggaaatgagttgcccctcctgtattttattaatgggtcatccggatgcttatacttagtctctaattgaatgctcagtaacctgaatatgattttcctttaaataaggcaggtagaaacagaatgctagatattgccagagctttctacacacgtgacagtgtgaatggaagctgataggcagcttctaaatggcttctaacaatcctcaccttgtatcaatcacactcttgtatcatctttgcctctagcataagcaagacctgtgatttgcttcctttgagatggagtcttgctctgtcacccaggctggagtgcaatggtgcgatctcggctcactgcaaactccgcctcccaggttcaagtgattctcgtgcctcagcctcccgagtagctgggattacaggtatgcatcactacgcccggctaacttttgtatttttagtagaaatgggttttcaccatgttggccaggctggtctcaaacttccgacctcaagtgatccacccgccttagccttccaaagtgctggaattacaggcatgaaccacagcacctggccaaatttgcttctatccaataggcaaatatggtgagatgtcacttttttggtgagcctacatagaattgctacttctgccttgctaacaaactctattgccttgaaaaacctgacaaacagttgctgtttgagagttggagagcaagtcttttcagtgtttcttgctgataactgagggcctcttccagccaacagctctcaaggtactaagacccttagcccaacagcactacaggaactgaattctgccaacaaccacatgatcttagaagcaggctgatttttcctttcccagacataccttcagatttgaccctagccctggatgacatcttggctgcagcctcatgagagatctcaaggacgaccaactaagctgggattggagtcctgacactcacatagactgtaagatagtgtgtcattgaatccaagttggtggtaacatacttggcaacagttaggtaacacagaaaggaagagaacttttgcttttatgagaggaatctaatggatttggaaacatgaaatagactgagaattgcctatttttattctctcgtaatgaggggtacatccaaatggaggaaagaaaatagaaaatattcgtagaaccctttttggtctacgtcaagtataatatcaactgtcatcttttactcaccattgagtacatcctctgctttaagaacgaggcatacattttcaatctcccaagaggaaagactttttttttttttttgtattggaaactggcaagagggtttctcatcatcatcttataggtcctagaccatctcaacacagaattttccccatcacagccaggcgcggtggctcacgcctataatcccagcacttcgggaggccaaggtggacagatcatgaggtcaggagattgagaccaccctggccaacatggtgaaaccccgtctctactaaaaatagaaaaaattagccaggtgtggtggtgggtgcctgtagtcccagctactcaggaggctgaggaaggagaatcgcttgaagctgggaggctgatgttgcaatgagccaagatcacgccactgcactccagcctgggcaacagagtgagactctgtctctcaaaaaaaaaaaaaaaaaaaaaaaaaaaagaattttccccatcaccaaggaaaataagcaacttacccaactaccttaagtacacaatctgggctgatcaagctctcaagaagttttgcaactccatcattgcccaagtgattttgaagcaagttgagtctttctagtgttttgttggtggtaagaacagaggcaagagatcgacagcaggcactggttaacatgcactcttctagcctgcaacgaagatgcacaggtaaggtggggccaaatccttgaggaaaaatggcagatgagatgggtgagaactggacatctactagatccctccaagttttgggcaaaagaactgactgtgcaataagagtcccatttcaaacactagactattatgtccgaggtattgtatttcccaatccacttcctcttgtgcttttcttcagctgttgctagctaaaggcagggatctttctccaccaggcacctacccaatattcaccaacatgcagttgggatgtctcaaaccaccacatagcagctgcattcctgcatcttctattttgttgctcccaatctccaggctcctcagtttttcattagtagcaataactatggcaatatattgacagatatcgctgctaaagaaacagccagacagactgcaaaacagaaacatgagctagagtcatgaccacctgtctccaaagatttatttcacagagtgttaagcattcttggacccgtcttgtgacattcatgaataagggactgcttacagaaacaagagcagtgttaacatctacaggtcacttacaacataccaggcattgttcaaaactcctaatgcacattaaactcacaatgatcacagggctcttatcctggttttacaaacaaggaaactgaggccagaatgttttaagcatttttgtcccgggaagccacatacattcaacctacaccgttgcaatactgagcttggattctgaagaattatgttaggcaacctcctctgacattcacgtttctgcctttcagtactcatgtcaaaatccaacatcgagaagggctaaatacattctttctataaagaggattttaccaaatggtcctttctcaaagcaagcaacgtactcacgattgtccgtgttctcccatgtgacctgccaccttgtttttccattcacgtctcccccattatctactcctacaatcctacttcattgcctcaccacgttggccttcgtgttgattctcgagcacagttggctgtttctctgttaacagctctgcaccgactattcattctgcttgcaagcgccactctagtgatctgtatgactccatccacaaccttctccaagtctttgctcaaatgtccccttgtcaatgaggtgacattgaccttgcttagagatggccataccctaccctcagcactcctgattacgtgcccttaggattgaattaaaaaagtttccatagcagtttttactgcctgatacaggagttgacggcctttctctataaggggccagataatagtttaggcttcaccggccatggtgcctctgtcacaactactcagttttgccactgcagcacaaatgcatgcatgaaacacatgtagatgaatggctgtgttccagtaagatctttataaaaccaggcagagggccagatttggcgcctgggtgatacagtttgctgacctctggtctaacaatacataagtttcttatgttttatttcctatctcccccagtgccaatacaagatccattaatacatggatatttattctgttcactgatgtatcccagccacctagaggagtgcctgacacttaacatatattctttgttatagaatgtatattaaatactgaataatcatattaaagcagattccagaagatcctatttttcatttagtagttataaaagttgggtggtgcattcctgtagtcctagctactcaggaggctgagacagaaggatcacttgagcccagcagtctgagactggcccgggcaatatagcaaaaccctgtcggtaaaatatatagagagttaatgatgtgccaaccacatccatgctttcaaacttagaggaaaataaagggtgatcaataatgtgggcttccatgtgccctatgggagctcatagaggaggtccctatccagctttgggtaggtgatagacaaaatggacagttatacttaagacaattcttgaaggatgacaaaagaacgtgtttggagtctacagcaaggttcaaactatggtctgagagccaaatctagacaactttgttttttatttataaagttttattggaacatagccacacccatttgacatttttcatggcctctcttcagctatgggagacttaaaaatagttatgacagggacattatggcccacaaagcccagagtatttactgtctagcctgttatagaaaaaggtttctaacccctattctacagtatgagtgaatttgtctcaacctactaagtacaaactaagggccatgaaaaaaagggagggtgagttatattattttccccaaggcagctttccctaaactgccttgtcaaaggaagcaagattctagaaagaaaagatatccctacaatttcctattttacctgcccatttgtaccaaattacaatggtaacatggatttaacttataactacaagacagaaataaagataagataccatactgctgagcatattcttatacagtccagtaagcacttcagttcaggagctcacaagccatagtgttgctattttatgaacaggagatgcttttaggttatcagtttcttatatttctgagcccaaaaaaaggcatttgaaatagaacattttcaagagagttcaaattaaacaactccaaggcattttttaaacaatttttttttcaggcaagtgggagaatcactacttctgagaaaatacgagaagtttgattattcagcatcattgatgaggcacactcaaaaaactgtagtggcttgttacatattttttcctggaagttcaatcagaggccattgcatcatgcctaaattagatgtctttggtaggtaccagtggcttggatatggccacctcccccaatgcatcccttttccaataaagctatttcccaacagaaagatgcccccatgatcgccaaccccaaaagatattcactgcctcagaaattgcaagccaggccagggcaggatctttgggtcccttctcctgtggcattttcccatgctatgtccacccggggcagggggaggggtccggcccaggcacccttctccatgtgataaggatctgagggattttgtgaactctgctccttctgagctaaaaggttttgccaatgaatcttaccgtgctttcatgtcgcctattctggggagcccatgctcccgtacccctatcacccatgatgccatcactggaatcttatccctgccaccaaccccaccacccaagccctcatgcagtagaaacacagtcatccaggacaactgtgggagacttactgaagctcctctaactgacaggttggaaacagcaagggaaacgtcacatgcaacactccgtaattttttaagcgattcacacacaggtctagttgtcttagagttgggctgaacagaagcactcttccaagggcgctgcagcaattttcagtgagacagcagaagactaacctgcacacagagaagagtgagtcagtgacagtgtgagcaccagagaggggagcacctgagaccacccaccccacgcccacgggcgcctcgatgccttctactgccattgccccaaatctctaccaatgactttcttatttggaaaaggagattagaagtaccccaaatagtgcagaggctgaaatacagaatggatgatgcagaacagggcatgagaaaaatctaactccaacttctactaacggaataatcttatagacgttacttctggaacttggtttctcccatcgtttgataaagtatatttggctaaattgaatcctaggattttcagtttaaaaactcactttgaaagagttactttattatttataagtgaatacaggaactgttgaagatttttttaaactgggaaaaagtggagacagacggcacaccagaagccctgttgttagcccattttgtggtatcccgttttgtctgtccaggtttagctcgttgccaatatgtggaagtttactcaatcctaatctggatttccagcctctatttttttttccattatttatttttaaataatttttaaaaatagagatgggggtctcactgtgttgcccaggctggtcttgaactcctgggctcaagtgatccgcctgccttggcctcccaaagtgccggaattataggcgtgagccaccacacccggccgaatctctattttttttaacccgttttctgtttgccctgggaatactgcactggcagtgagctgcacttttttcctaaacagggaaggggttaaaaagttggaaataggccgggcacggtggttcacacctgtaatcctggcaccttgggagggggagacaggaagatcacctgagttcaggacttcgagactagcctggtcaacatggtgaaaccccgtctctgctaaaaatacaaaaattagccggcatagtggtgtgcacctgtagtcccaactacttgggaggctgaggcaggagaactgcctgaaccggagaggtggaggttgaagtgagccgagattgcaccactgcactccagcctgggtgactgtctccaaaaaaaaaaaaaaaaaaaaaaaaaaaaaaagttgaaaacaaccaatttattggttggaaatactgaatcttggctctggtatgggaaaagggtacactagaccagaggctggcagcacaccaaacctggcccctccctgcttttgcacagctgcaagcttagaatgatttttgtgctttaaaatgatcggaaaatgtatatgtagttattttaatttgggtttgacacgtgaaatgggctaggttttcctttgtatactaatgcgtgcttattttaaattatatgtacaagtaaaagttaagactaagaatgagctagagaagttccctgttgtcctcgtagaaaccagcactatcaactcatttgcatactattttccagctgtcagatttggtcacgaccataaatttggccttttacaggtgttttcctcagactactgtgatttctttcacgttcttaggcttagaaattccttgcctatttaaaataagttaccaaaacaaatattttttgcttagtatatctggattattttaaatacaggtatgaactacgaaaaactccatgccaacaatctaaggtgataaaaatgttctaaaattatattgtagtgttgtacaactctaaatatgcataaaaaacatcgaatgtgtaccttaagtggatgaattttctgatatgtaaattatacctggaaccagtgggaaaagaaaaaaagaaaaaatctagcaggaaacaaaaaacttgtagatatgagatgaaaaaaatatctatttggagtctgattattgaaccaatggtctgtcccttttttcatgagaccttcttttacaacaaaattagctcatattgacaattacttactggatttatctggggccacatggatcttagaacaatttgagattttaaagacatggc[179 bp omitted]gaggcaggagaatggcgtgaacccgggaggcggagcttgcagtgagccgagatcgcgccaccgcactccagcctgggcaatacagcgagactccgtctcaaaaaaaaaaaataaataaaagcatacataatgcgatattacataatatgaacaggagtttctggtgttatcctgcaatcaaacaagtattttttacagaaaatataaagaatataaagaatattatatcagtttgtattatgttttggaatctagcaagtcctaaaaagggggcgaaaggagctaaagggagccaaaaatgggcgaaacaaaaaaacaagatgacctactgcattcttttgtctttttggaatttggaattgtgaacggggaatcatgtccttaaatacaccgagctacttactgttttgttttctgaccatgttttacagatctccgcccttcatttttgtacctttatgcctcacttttgccacttttttgccatctttcatcgtgtttgccatgccccaaccttccggaagtctgcctttctagccactttcccagagcagacagagcttacctacgagtaacccacagtcggttacatacagggagagcccgtcttccaccttcttgaaaggagactcaggggaaaaaatcctatttcaaggcaatctagcaccaaacctttcctttgctttcgtctttgtgttctcagtcacatctcatcctacacgacacccagttcacgtgttcactgtgagaacaatataggttccctgctcttagaaagtcagttgctatggcctaggtgctgtgtttagaatgttgtgaccaccattttttattttttattttttttgagacagagcctcgctctgtcacccaggctggagtgcagtggcacaatctcggttcactgcaacctccgcctcccgggttcaagcaagtctcttgcctcagcctctcaagcagctgggactacaggtacccgccaccacgcccggctaatttttgtatttttagtagagacagggtttcactgtgttggccaggctggtcttgaactcctgaccttgtgatccgcctgcctcggcctcccaaagtactggaattacaggcgtgagccaccgcgtccggccgtgaccaccatttttaactcttatctccaaagatgtatgtttggtcatgttatgactccactgtccagattgagaaatacaagttgaaaaaaaatccagaaacatttttgccaacgtttcgcaaatcagctgtcaacccagagtattaacccagacctactgaactccaaagactgtgctttcggctgctttgctttgctgtccctttccccaccactgctctttgatcatgtgcttagatattcaagtcagtctgagcttctacgtggtgagctcgtctaagccaacttacaccagtgatataagagtgcagttgggatgaagcaaggcatcacacagtatgttcatcccgtcgctcctcagcggattgctggataaggtcagttttctcagactcccgccactgatgaggagagaggcgatttcttcacattcgctggctcgcaaatcacatttcatcaagctgtaagaggaattcagaaatgaaaagaggctcccgcgtttaagctatcccctcttttaaattaaaaaaaaaaaaaaagagagacctaaccaagtgcgatgatgtctacttggaaataaatagatccctttgcttctaacctttcttctccctatgccactcctcagagttcaaatttgggcaaggttacagattcacgaagggctgtgagcaggcagttccttcctcttttgcattcatctccatgtggtttccagggtgatggttcagaacggtaagtcaggtatcaagcatcccacctgaccatgggatgtgggtacgatcacatttataaatctgatcaagaccctcaacttaccatcacatttacaaggacttctgatgttttttctgcatagccttgggtgccccacatgctctggctctcaactatctctattttctttttttttttgagatggagtcttgctctgtcgcccaggctggagtgcaatggtgcgatctcggctcactgcaacctctgcctcccgggtttttaagcgattctcctgcctcggcctcccgagtagctgggattacaggcatgcgttaccacacccggctaatgtttgtatttttagtagaca[131 bp omitted]cattctgtaccatcctccctgatctcctcactctccctcaagtccacaagcatatttttgctttagtgtctagtacccttatctctacttagtgattttccccatgggaccctattttttaaaaaaagtttttttccttaaattatccaggagtggtggtgcacgactatagtcccagctacttgggagactgaggtgggcggatcacttgaactcaggagttcgaggctgcagtgagctatgatcataccaatgcacttcagcctggacaactgagcaagacgcatctctaaaaaaaaataaataaaataagtagaataaaaataagtgatctttccccagatagctgcatggtttgctgtctcactttcttcaacttgtcactcaatattctcttcttcaatgaggattttgaataataaccatctttcaactaacaaatattgttattttcaggcattgtatgaagttcctgggatacagcagaaaactggaagaaatacgatggaattctagcattgtaaagacagggctgaatgtatcatgtgcctagtagatgatcagttctttatagaaagtaaatcagagtaggtcatagagaaagaaaaggatgtattctacttccttatggggcaggcactgagcgaagactctcactgagccatcgtacttggcctgtgtattctattttgaatgaaatggaagcccttgagggtttgaagattagaggacagaagagtcagaagctctgacttaaataaggtagaagaattttaacagaaacttgagagaagagggcaagctctgaatctctaggacaagggaatttctgtcagaggaaatgagtggaaagagtcagaagcaggagcaggtttggtgttttaaacatctacaacaaacagtgcagccgcagcacggtacataaacaggagatggggagagggttagccagggccacccagcgtgaaatggtgtattctatattattattattttttttttttttgagatggagttttgcccttgtcacccaggctggtggagtgcaatggtgtgatctcggctcaccgcaacctccgcctcccaggttcaagtgattctcctgcctgagactcccgagtagctgggattacaggcatgcgccatcatacttggataattttgcatttttagtagagacgaggtttcgccatgttggtcaggctgtctggaacgccttacctcaggtgatctgcccgcctcggcctcccaaagtgttgggattccaggcgtgagccgtcgcgttggcctgtgtattctatttggaatgaaagtgaaagccgttgagggcctgaagattaaaaggacagagtcacaagatctgacttagattgccattatccttagcaaactaacataaggacagaaaaccaaataccacatgttctcacttacagatgggagctaaatgatgagaacacatggacacatagaggggaacaatacacactggggccgacttgagggctgagattcagaggataggatcagaaaaaataaaaatatctatgaggtactaggcttagtacgtgggtgatgaaataatctgcactaactcccatgacacaagtttacctgtgtaacaaacctgaacacgcatccctgaagctaaaagtaaactaaaaagagttaagtctacccttgtagtaaaactgatatatcaaaaaataaagctatgttttgcttcaaacacacacacacacactcacacacacacacacaccggaaaacaaaacaatccaaactagatgaaagttgcccttctacactcttttccatgtagcaagcaaaggtgtggacaggtaggaagatgctgaagtactgcagataggtgggagatgggttggtctatcatgcttagcagtaaaggaagcaggaaggagtcagatggatccactctaacaacagacctagaaaatttgtctaagccaggccacaagaaaatctgtatttgaaatgcctatttaaatatcaaagtaagaggctgaggtgggcagatcacgtgaggtcaggagtttgagaccagcctagctgacatggcaaaaccctgtctctaccaaaaatataaaagttagctgggtgtggtggtgtacccctgtggtcccagctacttgggagggtgaggcatgaaaattgcttgaacccgggaggcagaggttgaagtgagccgagatcaccccactggactccagcctaggtgacagcaagactttgtctcataaataaatatcaaagttgatatctctacaaatacttcactgagtctgaaaccaggagaaatgtttgtaaataagtacctaagagtcttcatcacatagaggctacttaatgccatgaataagaactcatagaaggggtatagaaaagacatttagaaccacttggaaatatcccaaagataagagtccaggaagatgaaaaacaagtaaagatgactgaggaggaataatcaaggtttgggaaaaaccaaaggccaagaggaaaatgtgttccaagatgaaaggagtttggggaggggggcattgaggtaggggagaggctaactacaaagtggcaacagagttgggatttagctgggagaatgtgatagggagaagggatgctgagtgaggtggaaggcaatgactctcaagaaccatggaatttgaactatgtcagaaagaaagtgaggggctgggtgcagtggcttccagcactttgggaggctgaggtgggtgggagaccagcctggccaacatggtgaaaccccatctctactaaaaacacaaaaattagccatacgtggtggcaagctcttgtaatgccagctactcgggaggctgaggcaggagaatcgcttaaacccgggaggcggaggttttagtgagctgagatcacaccactgcactccagccagggcaaaaagagtgaaactctgtctcaaaacaaaaatgaaaacaaaaacaaaaagaaagggatgaagggggtgaaagggtgggaagctgctgctcaaatggctgaaggacgcagtaggattaaagggtgggaagatttgcttacaagacaaagcagcttgagaatacaggaggtgccgttagagcatgaggtacttgaaattgagagtacaagcgaaatgtacttattggagatgaagtctagcaagtggtattatccaatattgagtcaccagcaagtagagctactgagcactcaaagcgtggctagcatgactgaggcactggattgttagttttactacatttacattggaatttattattcatttatttatttattgagatggagttttgctcttgttgcccaggctggaacgtgcagcggcgccatctcagctcactgcaacatctgcctcctgggttcaagcgattatcttgcttcaccctctcgcatagctgggattacaggcacctgctaccatgcctggctaatttttgtatttttagtagaggtagagtttcactatgttggccaggctggtctcgaactcttgaattcctgacctcaagtgatccacatcctctgcctcccaaagcgctgggattataggcatgagctaccaggcttggctagtttaaatttaaaggttgattccaaattattggaagatttaagtatgtttaggacacgggcatgtgaattagttctctcaattgtaaattttatgaaatcaatacggaggtcaaacatttctgatgaaaatgtgcccgagcggcgatgttctctgtgaaatactgggttctgcagccttttacaaaaaagggaatataaaatcacatcaatagctttttgcattaatgacatatggatataatttgatatgctgggttaaatactgttaaaattagtttcaaggctgggcacagtggctcacacctgtaatctcagcactttgggaggctgaggcctgtggatcacctgaggttgggagtttgagacaagcctgaccaacatggagaaaccctgtctctactaaatatacaaaattagctgggcatggtggcacatacctgaaatcccagctacttgggaggctgaggcaaaagaatcacttgaacctggaagtcagaggttgcggtgagctgagactgtgccactgcactctagcctgggcaacaagggcgaaactccatctcaaaaaaaaaaaaaaaattagtttcacttgcttccttttactttttaatgtggctactggaaaatttcagtttgtggcttgaataatttccactagacagtgttttagggtttgaccagtagtctacttcagaatgaccagaggaattagatcattagagaaatatcagtcaagggagggagaagccatgttatatgaaatatcaatgtagaaattgaaatcaaaaggcaggaataatgttggtgaaagaaacaaaccacgtgctaaaaaaattgaggaatgagtgacatcaaaaggtaggagcaggtagtgttattgaaggggcacctctatccaccaacacccaggcattcccctcacatgcactgagctttcagccgagcaacaactcacctcagatgacttatttggcatgtgggctcgtgcaggatgtcatgcagaagtgaaaacatatttagggaaatggacgtacagttgatactcaggtatgtcaggctccgattacgagccaaagccttgagtaagtcttcaaaaccagaagcagtcgagacataggacaacctgtggaagacataatagcaggaaagcactagtgaaggtctgaacatcttctccacaatttctcctgcctgcctcacttcatcctgtaacaaagattctcagtggattacatcctcacacatggctctcgatcttaaatttctagtcaggtcagaagactattgctaattccaaggtcagcctgttgactttgaagtaatcccctgggtctttatggtgtgttcacctcatgacctttcttaagtgggacccacaagccggatactaagaatacatccacatgcacaaagatattaagatacatccacatgcacaagtttaaccatgtttttctacactgagagcaaaagacaaaatatgctgatggctgataatagccacacaatcaaccacatgtaaattactccgtttcagcagtcccagccagagcaatcaggcaagaggaagaaataaatggcatccaaataggaagagaagaagtcaaactatcactgtttgcagatgacatgattccatatccagaaaaccccatagtctcagccccaaatcttcagctgataaactgcaaaagtttcaggatacaaaaagaaaaaaataaaatcaatgtacaaaaatcactagcattcctatacaccaacgacagccaagctgagagccaaatcggaaatgtaattctatccacaattgctcacaaagaatacctaggaatacagctaaccagagaggtgaaagatcaaaaggagaattacaaaacactgctcaaagagatcagatgacacaaacaaatggaaaaaacattccatgctcatggagagaagaatcaatattgttaaaatggccatactgcccaaagcaatttacagattcaatgctattcctatgaaattaccaatggcattcttcacagaaactagaagaactatttaaagttcatatagaacaaaaaaagagccccaatacccaagacaatcaatcctaagcaaaaagaacaaagctggaggcatcacgctacctgatttccaactatactatagggctatgataaccaaaacagcatggtactggtacaaaaacagacacatagaccaacagaacagaatagagaacccagaaatgaggccacacaactacaaccgtctgatcttcaacaaagctgacaaagacaagcagtggagaaaagactcccttttcaataaatggtgctggggtaactggctagtcatatgcagaagactgaaactgaatgccttcttcacaccacatacaaaaaccaactcaagatggattacagacaaaatgaagtgcaaaactattaaaaacttggaggcgctgggcacagtgactcatgcctgtaatcccagcactttgggagactcagatgggcagatcacaaggtcaggagttcaagaccagcctggccaacatagtgaaaccctgcctctactaaaaacacaaaaattagctgggcgtggtggcgggtgcctgtagtctcaactacttgggaggctgaggcaggagaagcacttgaacctgggaggcggaggttgcagtgagccgagatcatgccactgtactggggaacagagcaagattccgttataaaaacaaaaacaaacaaaacaaaacaaaaactaggcaataccattctggacataggaatgggcaaagatttcatcatgaagataccaagaacaattgcaacaaaagcaaaaaatgacaaatgggaagtaattaaacagaagtgcttctgtacagcaaaagaaactatcagagcaaacagtcaacctgcagaatgggagaaaacctttgcaaacaatgcatctgacaaacgtctaatacccgcatctataaggaacttaaatttacaagaaaaagataacctcattaaaaagtgggcaaagggtataacagacagttttcagaaggtgacatacatgcagacaacaagcatatgaaaacaagctcaatgtcactgatcattagagaaaagcaaatcaaaaccacgagataccatcttacaccagtcagaatggctacgatttaagaatcaaaaaataacaggctgggcgtggaggctcatgcctgtaatcctagcactttgggaggccaaggtgggtggatcacttgaggtcaggagtttgaaaccagtctggccaacatggtgaaaccccgtctctaccaaaaatacaaaaaattagccagcttggtggtgcatgtctgtaatcccagctactcaggaggctgaggcagaacaatcacttgaacctgggaagtggaggttgcagtgagccgagattgtgccactgcaccctagcctgggtgacagagcaagactccacctcgaaaaacaaattatgtatatatatatatgtgtgtgtgtgtataaataaaacagatgctggcaaggatgttcccactgttggtgggagtgtaaattaattcgaccattgcggaaagcagtgtagtgattcctcaaagagctaaaagcagaactaccatttgacccagcaatcccattactgggtatatacccaaaggaatacaagttattctaccaaaaagatacatgcacatgaatgttcaatgcagcactattcacaatagcaaagacatgcaatcaacctaatgcctagcaacaagattggataaacgtgatacatatataccatggaatactatgcagccataaaaaagagagcattttttttttttggcgggggcaggaatatggagttggaggccattatccttagcaaactatcacaggaacagaaccaaatactgcatgttctcgcttgtaagagggagctaaatgatgagaactcatggacctgaagaggagaacaacagacactgaggtgtacttgaggggaggagggagaggatcaggaaaaaataaatgagtactaggcttagtagctgggcgtacagtcttatagtctatatacaaaatatgtacgtcaaacctgtgacacaagtttacctacataaacaaacttgcacatgtaccactgaacctgaagttaaaaaaataacaattcacggctgggtgcggtggctcacccctgtaatctcagcactttgggaggccgagacaggtggatcacgaggtcaagaaatcgagaccatcctggctaacatagtgaaaccctgtttctatttaaaatacaaaaattagccaggcgtggtggcgtgcacctctagtcccagctactcaggaggctgagacagaagaatcgcttgaaccctgcaggtggaggttgcagtgagctgagatcacgcactgcactctagcctgggtgacagagcaagacgctgactcaaaaaataataacaaataattcacaatttcattgaggaaaaagaagttgtcctagagtcccaccaccaccaccggccctcacccccaaccccggaagaacatttctcattactcccttggagttgcagcaggacatcagggcaacagctttggtcattgtctctaagggccacctagagaaaagagttaggaatctccaactcaacattaaaggaaagagacgggaagggaaatgtggaagctggccaacccttggaggattgaggatcctatggcaaatccaggcatagaacacacgggaagcccttttaatttacttcccagcctatgtggcgactcggtgggagactggatgttttccatgttgccgtattttcagagtcctttacctagcaattctcctgatccccattttacacaaacaacttctctcccaagtctttgccccatgttgcaacaaaactgtttaaggttttgtttttttttttaaatacacacaatggagtctcactctgtcacccaggctggagtgcagtgccacaatctcagctcaccgtggcctgcgcctcccgggtttaagcgattctcctgcctcagcctcccaagtagctgggattacagttgcatgccgccacacccggctaatttttgtgtttttagtagagatggggtttcaccatgttggccaggctggtctcgaactcccaacctcaagtgatccacccgcctcagcctctcaaagtgctgggattacaggcatgagccactgcacccgccctaaaagtcttcagttctcctttcatcattttcaattaggcttttctgctctcactacccttccagaactgttcttggccaacaatgacttctaccttgctaatgtcattggccaattctcagtcttcagtctccttgaataaggactgccatctgacacagttgacctttccttcgttgggaaacttgcctcactgggatccgaggataccacaccctttactttaccttctagcctaatgaccactccctcaaaggccttcgctagtttctgcttttctccccaatcactttatgttggagaactccgggcatcagtctttggatcgttttgcttcctgagcaacattcctatccttggtgaactcagtccttggctttaaatacacatttgtgttatacacatgtatacatgaacgacacccacattttaccttcagttcagaaacattacacactgctctctggacacctaatagacatcacagctttagctcaaacaactttagactgaccttcctcagattctggctctcgccgtcatttcccaactcagtggcaactctcacatggcagttttcaaaacaaagatcttgggacaattctctctcctagtctagatttaatcaaggaatcatcctttgtcaacatatgccccggagttcgcacctcaccaacctctactattcacaccctcagaggcaccattgattctcacctggcaaatgccaagaaaaagagcctcctctgagctttcagattctgccctatgctccccgattggccatttttaaacgcggtatccagaatgagcttcttaaaatgcaagctaaattatggcatctctgctcaaaacccctcaaaatgcctcacctcactccagaaaacccagtcctgacactggtttacaacaccatgatcatgccatacatacttgtgagccatctccgtaatacccttcctgcctcacactggtctaaacatgtaggtctctgaactcaaagcctttgtttcatggatccctcccatcccaggggatgaccaacagtttatctggctcattctttcacctcattcaagtctttgctcaaatctcactttctctgtggaacttattactacagcctgtaccctcccacacccctaaatacccacttatgcaccctgaccttgccattcttttccccccgtaacaccattatcctaaaatactttaaaatgcgtgtacttattatgtctgcctatattctgtctcatcagatagcaaacaaggaaatttgtcttttttccccccattgatatatcctagtgcttagactagcacctcaaacaaagtaggcattcttcttgaatgaaaataaagttaactcctgggcttccagaatcctaagatcatatatgttgatgtgtactgaatattttagtgccatttcctatagagctattataaactcagataaatactaattttcccagtgactgtttaggcaagtacagctgcttttcacctgattctaacgcattctgtaggaaagaaactgttagactcctaccctgacccatttttgctttcttccttaggataaacccacttgttactatttcttcctgattccaagagactactttcccagtccccctttgtagttatatgaagccgtatgaagacaaggtaaacaggccaatgagatgcaagcagaagtgatacaagaaagagttttgaaaagactccatcaaggaagctcctgaagcttctagataaacctttccttctcccttctgttgcttcctgccttgaaggcagccatgatggctgggacctcagatgctactgtggcctaaggtcatctttatcatagacacactaaagatggttgagaagtacagaaggagcctaggccctgatgagcctgacctgaaagtgtgttttgtatattgtcttctcccagagaaagaaaaagaccaccgttattcctaggggaacctctaaggcagaggttgatatagtacttacttgagtgtgcgaagtttacagctagaatgctccagggctttagacagaatcctttctgaaataccattaaggtcattgtcaaagatatgcagctcccggaggctctccattgtataaaaaagagagcagatctctctccagtagacaaggctcttcatttgactacatagaagaaaaattgagttttccaatggaatcgattcaactccagcaatttgtaaaacatgtaaattaaagtatgttttgagagtgcctgttgtctgactcagatttaataccatgcagcaagaaataaagtagggtcaaacatgaatgaacaacactcagatccattaaagtagctggtgattccatattctgataagacacatctgagtgcagggcctttaaatgcgagattattaaatatttttaaacttcaatattaaaaatcaatgttgcatgttttgtgctatcatgaatactcctataatgtaacaatacaaggtttatttctttttaatctatacaacagatctgaagaaattaggttaaaccactggtttgcaatgaggcaattctgccgctaagcagacatttggtgatgtataagatttttgttgctgtcacaaacggggaaaaggggaccctactggccacaggagagaccagagatactgctaaacctcttacaatgtgcaagatagacccccaccacaaagaatagctggcccaaaacttcaacagtgctgaggtttaactcaaactttgagtttaaacagaagcagagagatttaagtcactggtctaattagaagctagattggaagtcaagttcttcatggccccgagtttgtcttgttctggtcaacaagctctagaattatgggcaggtcttaggaagacaggaaagaggatttattttttaaagactcacctagcagttggccttataagtggctctttgttttgaaagatgcgctgaacactcaacttaagtgtcctcaggtgacagcagtaatccagacagtataatgagaccatcatatccttgtctgattgaaggtaaactgtaacctccatgagagcatccacaatcgtcttcacaaattcttcttcccgattctcatagagacagtaaaacaaaggcatatggtgcgtcaacttttccgggtcacggtccaaatgtttcatgtatcccaccgagtaccacttgaagctgtctaccatcggtagctggtatccaaaggatgtctcaagaatctttctcctgtttgcatttagaagaccaaaaatgaaagtaaacacttgattaaagtcagagtattgttctctcttctctttatactctctgctgcctgaggggatcagatagttgggtactgccatcagaaatgcaatggctgtacaaaactcctggacgttcaagtgtatgaacttgtaacggtctttatgagtgttgctcggcaaaagaatattcgcggcctgcaacacagagacatcagcctcagtaaacccaacacatctgaggtcttcaccactgaaattcagggtgctcagaaacagtcctcctgcagccagcaaacacagacgttttaggagacctaggtgatactgattggcagtaagtccagcctctgatgtcaacgcatcagcaagaaagtgggcatgtagatcagtgggtgtttggcagcagagctggaagtcacgccccttgtccatctgccgcttcaggacagtacacgtgatccagcataagatggcgactcggcacagacccacgagtatttcatcctcatgtacaagctggagggctgccgacgccctctggcggtctttaaagaaagagttaaaatatatctccctcttcccattcgacagctgcaaggtcgtgcagcaatctacctctttcaagaacgtttttacattattcccacgtgtgggccttgaggagatgaggaaccagcagcctggagccatttttctcttcagcaaactgaccaggagaactggaatgggaactttctgggtgctgttactacacaaagcactttcattgacatttaactcgaatcttatgttgtccaagtcctcgaggatgaaaaggagtttcttgggatcagacaggatgtctgcaatgggagcctggccgtcaggccagtccttggcgattagctcagccaagctgctgttggtcatctggtttatttcgtgagcagtgaggtgaacgacgtacgagatcatgttctgccacatctcacccttgatccacctcaacacagccagatttataacaatagtttttccagatgctctctctcccatcaggaacacattgagattgtttgctgaataatagctggtagaatcataggctaattgaagtatgtagaacacatctgacgaaacgtcacgaaaaaatttataatgaaattttccaaaagtgtgactttcccattgcagcatgaattttctcctcatgacagctttgcatgcctcctgattgcctaatccagcgagtacagggcagaaaatacagaacaaagatgaaagttcaagatgtaaaaacagttttagcttcttttcatgtttacagtaaaaatatagtagaaatttttacttactactgcttatcacaaagatataggtacaaagatatttaccatcatgttgcttgtttttgagatggagttttgctcttattgcacaggctggagtgcagtggcacgaactgggctcactacagcctccacctcccaggttcaagcgattctcctgcctcagcctcccaagtagctaggattacaggcgtgcaccaccacacctggctaattttttgtatttttagtagagacagggttttgccatgttagccaggctggtttcgaactcctggcctcaggtgatccacctgccttggcttcccaatgtgctgggattacaggcatgagccactgcgcccggcccatattgctttaaaggaaaaaggttgaataaaacctattcaactcatacagtggagtcgacagatctgttttagctttgttctttatccttcaagggcttccctctcatgtcttggcatcaagaacatatttctttcctttttgggggttccttagcgttttaggtagccttcaattatgtttcatttcatacccagtttttcctttgaggcaataactcgagttcagggactgtttcctggtacgtattcagctcaaagtatctattacatcttggcccatcagtcatgagttacacgttcatcttcccttctatttttttgtttatgcatatcattactgaaatcctgatcatttaatgaactacttaagataaatgaaattgtatggaataaagttaaaatttatcgtaaagggagtcttatttcttgagaatacacaagattgcactcccactgcaaaaacaaacaaaaatgttaagacataagtataaagctgtcatagaggtatgatacagaaatgatccaaataagtgaattcctagagggggatgactccttccttagtgagcagatacttgaaaatgtttttatccctgggtaagggcaggcaaaagagggagcctggcagcatggaagaactttgatgggataaataaaagccaatgatgaacagctgcagcagggctggtgtggtggacctgaatgtactggaatgtggcacactggctcccccccagtggagatgagcctgatggatcaacgggcctgatcccaccctctagactaccagggctgcctagttccgacctagcacatctcaacagcctggcagagacaggactttctccttactgtttttatctatgacgtttagtatacaataaaaaaattgagattcaaagaagcagaaagccatggtgatgagtatggttcatgattataaaccatgattcataatcaagaaaaaaaaatctttggaagatgtctatttaggtgtttttctttttgccaatttattgattaggttatctgttttcttgttatgcagttccttatatactttggatattagttccgtatcatacatagtttacaaatatattctcccaatccaggagtctcttcactcatttccctttgccattcagaagctgtccagtttcacacatgtacacacacacacacacacacacacacacgtaagagaataaatatgtgagataatagatttgttagcttcatgtcaacattccacaatggaagcatatcaaaacatcacattgtcccatataagtatgcataactatttgtcaaaagtaaaattaaaaaaaaatgaatagaagcatatgtacggataacccagcttttggaattaggaggtaattttataataagtttcatattatgcatatatccccatatattaggtatatagagtataagaatcagatggatgctctgtaacttaaaatatacactatgcaaaacaaagaattcattggaatggctgaatggcagatggcacacacagaagaaaggatgagggggcaccagcacagatcaatagaattggcctaacaagcacagaggaaaaacaatcacaaaaccaatcagaccatcagggaactgtgatacaatatcaaaggaccagtataaaatacgtgtaattacagtcccaaaaggagaggggatgaaaaggtattcaacatcacgaatcagaaatgcaaataaaaatcacgatgagctattcccttcacacctgttagaatggatattatcaagaagacaaacggtaagtgtgggtgaagatgtggagaaaagggaagccttgtgcacggtgtgtggggctgtcaattagaggagtcattacgaaaaatgatgtggaggttcctcaaaaaatgaaaaatagaactaccctaggaccctgaagctctttcttgagaatcctttgtggtcagaaaagcctgtcaaggacgtttttattttctataaacttagttcaaaaccttaagtttattcttcagtccatttctcccttgtcaccttttatgatgagcaaaaccaccaccaccaggctgcatctttattgtccccctaaatctccttatcttcaagttaataatgtgcattttccactgttatttcaggaacaaccttgctaaactttccaccagttcaggttcccacctgataaagtccactgaaggtcaaaggcatgttgaaaacttattaaaatggtagagggtggccaggcacagcgactcacacctgtaatcacagcactttgggaggcgaaggcgggcagatcacctgaggtcaggagttcgagaccagcctggccaacatgctgaaaccccatctctactaaaaatacaaaaattagcccggcatggtggcaggcgcctgtaatcccagctactcgggaggctgagacaggagaatcacttgaaccaaggaagcagaggttgcagtgagccaagattgcaccactgcactccagcctgggaaaaaaaattttttaaagcagaggaaagttacaggtcaagtagtttcttgacctgtagtttcctctaccctttaattacttgacttgtagtttctttccccactgaaaatttcaaggcccatcaggcatctaccaatttcctgtcccaaattccaaagctccatttgagttttgttttccactgggagcagtctatgtaagtactaagaccttttgcaattactactgcgatatgtcgagccatcccagaagaggtactgggtgaagaaagtgaagaaaagaaatcatatctgatattctcttaaatatctgcaatttggagagaagtaaacagagcaggtgagcatgtacctcatgaggaagggacagcacaacagtcttgagaataagatgatcaagagaagcaggaaggatttctattttctcagggccctgggcagaggaggaggggaaagacattgcaatgtccatggaagtgagaaactcactgagtggactcagccctgctactgacatttaaagggtcaccatggaggacacagccatggtctccaggaaagccttctctcaaacttgggttcacttccccctcattgaaaccctcagtagatagtggtaaaaatgtaaagggtaataagagattacaacatggcctaggaggcatgttcagtagactttacgccagactgatatcagtctgtggcctgttagggactgggccccacagccgatggtgagtggtgagtgactgagcactcctctgtatttacagccgctccccatcgctcacattaccacctgggttctgcctcctgtcagatcagtgggagcattggattctcacagaagcgtgaaccctattgtgaactgcacataggagggatataggttgcaccctccttatgagaatctaatgcctgatgatctgtcactgcttcccatcaccccccaatgggactgtctagtggcaggaaaatgagctcagggctcccagtgattctacatcatggcgagttgtagaattatttcattatatattacaatgtaatagaaataaagtacataataaatgtaatacatttgaattatccccaaaccatccatctccaccccttctagtccatggaaaaattgtcttccgtgaaactggtgccaaaaaggtgcgggaccactgctttacactataccaggacaagctatacattttggacacagttgtccataagcttgagctagataagaaaagagaagtgaatgacaggataaccatgcaactaaaaaaaaaattactaattctggaagaaaacactcaaggaaggaaaacaagtttaccaccatgtcaaggtacttaaagtgtaatttttaaaatatctaaaatatgaagtgaggcatggttagagaagatggtagaccagaagctggtagtgtgcaccgctctcatggagagagaacagagcagcaacaccagcttttcaactggattatctaggacacacgggattcatcaaggaagccacacaacccacggagaacagaagagtgagacaggacagccaccagcccaggactggcacacggcccaggaaggctcctgaccacagggagatggtgagtgagcaagagtccccacggattgttattttacagtgtatatcaaaacatcaagttgtacaccttaagtatacataatttgtatctgtcaattacatcacaataaagccagaagcatgtaggtatggaaggaaaaggtctaagaaaaatgtatggcctcaaaatagagaacatagacagaaagatcaaattcaggttacaaaaaaaaatccttgtaattatggagtatgtaaatatgggtgacaaatgttttaaaaagaacattcatatgcacccctattaagcttttaaactttaaggataaagaaattattcaggaatttagcaagaggctgggcacggtggcttatgcctgtagccccagcactttgggaggccgaggcgggcggatcacctgaggtcaggagttcaagaccagcctggccaacatagtgaaaccccatctctactaaaaacacaaaaatgagccgggtgtggtggtgggcacccttaatcccagctactcaggaggctaagtcaggagaatcactcgaacctaggaggtggaggttgcagtgagccgagattgttccattgcattccagcctggacaatggaacaagactccatctcaaaaaaaaaaaaaaaaagaatttagcaataaacatgaaaaaggaaaacaaatcttaacaggttaacatttctccaaacatattcagtgccagaagacacagaaggaatttatacaatattaaaaaggagtggctggagagtattacgtccagtaaagttcccatttgtgtataaagacatgcaaagagttttagacataaaattaaggagttcactaaggaattcactcatgaatccttctcagaggcagagatggaggaagcaacaatgaagtccagttaactaaggcaatgaaatgaattattcatcacatcagggacaggggtatgtgataagccaggtatagctttaaatatagaagaagcctaaacaaaaagatacttgtgattgccatcaatagtcgaggttatgagccttgactccataaagtatatataagccatgggttggaggagaatagcaaaggaaggccagaagcctgtgagtcataacgatgagtgaagacatgctatactatttaattgggaagatacgagtttaaccaagtaaatattgtataaaagttgtcttcaatattagaggaatttgaggaccaaactacttcttcattctaaagaagatctactgttcacctataagacacatagactgaaaataagagggagatattccatgccattggaagccaaagaagaggagtagctatgcttatatcagacaaaacagattccatgacaaaaactataatgagacacaaagaaggtcattatgtaatacaggggttgatctagcaagaggatgtgacaactgtaaatatatatgcatccaacactggagtcctcagtttagctctaataattgctttatgtaagagagactctaacacaattacagctgtagacttcaacatcccattttagtgtggtattcatgatcttggtaagttctcttaacccctcaggtattcaggttttcaattggaatacatgattttatctattttagagatgttcgggagggactaaatgagccaatgatgacgacctgcataggagtgtacccaaaatgttaaccctccatgacgcttacacagagtcccctacatttctgtagctgggtcttatggtaggagcgtacccggttgttaaccctccatgatctttacacagagcccctacttttctgtagctggatcttatggttctaggacagagctctctgctgggaaatctgctctagctcaagtactttctttgagtctaatcctttggctggctactttcatataagctggtttgcataataacagaaaataaaggtaggatcataaagccacaaaatagaacatgacccatatccaatctatccctggtcctcatgtgatgtccagttctgaagactggttctttggggatggaaaagtcatgtatcaaaaccaccaagctaaacaattccatcaacaagtggactaaggacacaaatagatgcttctcaaaagaagatacacaaatggccagtatctgatagtccttgaaaaaatgaatatgaaaaaaatgctcaacatcgctaatgaccagggaaatgcaaatcaaaaccacaatgcaatcccaccttactcctgcaagaatggccatgataaaaaaaaatttaaaaaatagatgttggtatggatgtggtaaaaagggaacacttttacactgctggtgggaatgtaaaccactatgaaaaccagtgtgactattccttaaagaactaaaagtagaacgaccatttgatccagcaatcccactactgtgtatctacccagaggaaaacaagtcattatacaaaaacacatgcacacacatttatagtggcacaattcgcaattgcaaaaatatggaaccagcccaaatgcccatcaatcaacaagtggataaagaaattatgaacacacacacacacacacacaaatactactcagtcataaagagaagcgaaataatagcatttgcagcaagctggatgggattagagaccattattctaagtgaagtaactcgggagtggaaaaccaaacattgtattttctcttaagtgggagctaagctatgaggatgcaaaggcataagaatgatacattggactacagggactcggcgggaagtgtgagagggaggtgagggataaacgactacacactgggtacagtgtgcactgctcagacggtggggatgccaaagttttagaaatcaccactaaagaacttactcatgtactcaaataccacctgcttcccagaaacctatttagaaaaaaaaaaaaaaaaaggcccaacacccagcttcctgtgaagtgccctgatttctgcccacccttctcgtgaccccactcacggtttcgtctgccaatgatcttcctacaaagatcttccttacgcatcattgaaaatatgctgaagagcatattccatatatactgtccctcataagagattggcaacacgttagccagttcttcttttgtcatctgtatcagtggaaactgtggcagtttgaaatcaagaatcttgcgtgccagatacttcttaaaactctgaaattccttgtcactgagattctctagataccacagcaggtcaaagtcagtagaatccgattctgccatcttgcttctccagggaaggcagacttcagagaagggattttgaggcacaagaaatatgagatctaaaaatagatgtggaatcagacaatcaaaccacacagtaatgccaattcatccaaagctaacatcctagacaattcctgtggtgtgatagaagctcctttctgataggccatcaacgataagtctgaactctttctgtctgggtcaatggccttgtcgactgatcttggcaaatttctaggttctgttaaggtggaacatcagttgtgttaaaaggcaacattcttatggtaaaagttatccctgattagcaaatagcatataggttgagaattgagtatcatacagaaactttggaggggagtgtttcttttgaaattgtcaaccctatgcagattggaaatctagacttgtggtctcttacaagatatgctgttgtatatgaaactcctctatgttagaataatctgtatagcaattggctgtatttacaatgattatactccttggaggtatgtcattgatacgtataaggactcctaatgaagaggcaactgttataataagcaaacaggctgtttgtggtcttgtatgctgctgaaaagaaatctaagttatgatgtactctgttctgtcttgttagtatataaatgagccaaagacagcccctaggttattttttcactctaggctgaaatctgttagcgcataaagcccactggcttcagactcaagttttttatacaaccaattgttttaaacacagcccaaataagcagatgtttagccatgtagagcctgcccgctttgcatacctcgcagaactgctcccaacatctgccagcaataggtaagtccccagggtcaagatgactgcaaggtgctactgccctttggagctctcggacccaggagatcttcctccccactgtactgagtggtatcgcctacacacacacacacacacacacacacacacacacacacacacacacacacacacacacacacaggttgcctcttcaattctaccccacctctgcaggggttccccatcttcctgtcctcctgagtagggacccacacactgtagcccctggccaggctcctgctgtaagagacatgccccacacacaaacctgtgaaaatgccacccaaaaaagcatgtgtgcaactgccaccccttggttatcttttcccttgaccaatttctaaaccccgtgagcctcccacacctgtcagtttcaatgtcagtctaatcctggtatcattacactccgtcacgagaagttgagattgccgagttgtgactaaagaatccattccagagccttgacccaacacagtcaaggctctcagagtttatgacaaaggtagagaaagaagatctgatcagatatgagtggatgtggattggctaacatctccatggttttacagcaaatgcttcgacacagagaacaagggataaatagtccctttgggggcgaaaaagaaagttggagaatggcaggtatctgcttgaggctagactgctcgatctctaaccatgaaataaacctaactagatactcaaccgtaactaggttgttgggcgtaaagaaaccgccagtgaagctgataagatgcaccaaatacaagacagagtcactggtattgtagacacactcaacagtgatgcctacctgaagggaagaagtaggcatattaagcttgcagacctcatataccaggtactatgttagaagatagagccactgggttggatctgactccatcgtggccatgaagtacatggaaagatactcatgatcccccaataaaggggtaaaaaaatgggcatactgacatgcacctatggtacctgagttttgcagcattgctatgccaatccccagtgcccaacaaggtaagaactatgacaccctcttccagaacattttcatttgccctaaaggaggacctgcaactagtaagcagtcactccctgtttccctctcctcccctaaaggagcctttaaatgcatggttgagctggcagaaaaaacaataaggaagtcactgagtttcagaaggcacgcatgcacccagggagtcgctttcatgttaggtcaggtgaagtcgagcaaactttggcagcctagagctcagttttaggaaatcatatacaattttagggcaaaggagaagacaaaccctggggcacattgaggtgggaggacagatgaaaggccaccagtcagtggcaggggatagacaaatgagaaggttaactagaaaatcccactgaacagagggtggtggaattcttactctgctcagtatcgggtctgaggaggaaaggggaagcaatcgcaccctttgagttcctaaacctaagctggacttcggagagtaatcatcccacagcttttcgtctcatgtatatttttgtattctggacctaaatgcacaaacatgctaagaaatctttcgaaaacttagtttttcaaaaatgtcttaatctctcttaactcagaaaaaaagtcattacctgaataaaatggaatgtgaagccataaagattggtttctaggtctatatttgctggacctacaaagatatttataatatactattgagataaaaagcagtgaatgggactggtaccctgacatatgtacatacaggtgtcgtgttggctgaagccaggatttcagggtgtacagaagagagttaacatgacacgtccgaaactgccatctttaggatctgcctgctacattggccgttggctagcatctggaacctggatgtggaaggcaccccccacccacattcccagagctgataagagtggctcacatgcctttatggcttgtacagacaacatggcttatgctgaagctttgctgtccttctgggagcctggaagcttgcaatttccttccatctaagcagtgagccaattttctcggcactgtttaatgcatattttggaatatgctagggagaggatgcctatgtgaccagctctctctctctctctcacacacacacacacacacacacacacacacacacacacacacaccccaagcactgagtttgtaatgatcttccacagcagccaatacctcgtgtgtgttttttatcacttgctgctgggggaattccacatgtcctgggtgactctgccgggagaggacactcgggagcctggtttcctctggattttgtcccatgtgcctctttgctttgccgattctgctttgtagccctcactgtaataagtcacagctgtgaacaggactgtgcccagtcccaagtcatcccacctaacccaactaggggatggcattcaacacctgacacacagggtaacaggaaatagcctcacaacattgaatgacgtcctcctaaactcaccatctcttaccttgcagcaggcaaacccattaacattgttagtgatgggagaacccattaacattgttagtgatgggagaacccattaacattgttagtgatgggagaacccattaacattgttagtgatgggagaacccattaacattgttagtgatgggagaacccattaacattgttagtgatgggagaacccattaacattgttagtgatgggagaactgctttcaggtctaattactcccttaaatggaagtctccatcagggcaggaccactgtttctctttctccccagtgttctcagcctctgtatccataattgacacttagcatatttgccaagaggtcagt[141 bp omitted]tgaaaccccatctctactaaaaatacaaaaaaattaggcaagcatggtggtggtggctacctgtaatcccagctatttggaaggctgagacaggagaatcacttgaacctgggaggcagagattgctgtgagctgagatagtgccactgcaccccagcctgggaaacagagcaagactctgtctcaaaaagaaataaaaaaagattgccttagtctcattggaatttctcttctctctcaccctaaaatgatatctttacgtcatgactgaagatgtcaaagaaaaattttagaactgaggcttagaattttatcagactgcagggaggagccaagatggccgaataggaacagctccggtctacagctcccagcgtgagcaacgcagaagacgggtgatttccgcatttccatctgaggtaccgggttcatctcactagggagtgccagacagtgggcgcaggtcagtggatgcgcgcaccgtgcgcgagccgaagcagggcgaggcattgcctcacctgggaagcgcgaggggtcagggagttccctttccgagtcaaagaaaggggtgacggacgcacctggaaaatcgggtcactcccacccgaatactgcgcttttctgactggcttaaaaaacggcgcaccatgagactatatcccacacctggctcggagggtcctatgcccacggagtctcgctgattgctagcacagcagtctgagatcaaactgcaaggcggcagctaggctgggggaggggcgcccgccattgcccaggcttgattaggtaaacaaagcagccaggaagctggaactggggggagcccaccacagctcaaggaggcctgcctgcctctataggctccacctctgggggcagggcacagacaaacaaaaagacagcagtaacctctgcagacttaaatgtccctgtctgacagctttgaagagagcagtggttctcccagcacgcagctggagatctgagaaccagcagactgcctcctcaagtgggtccctgacccctgacccccaagcagcctaactgggaggcaccccccagcaggagcacactgacacctcacacggcagggtattccaacagacctgcagctgagggtcctgtctgttagaaggaaaactaacaaacagaaaggacatccacaccgaaaacccatctgtacatcaccatcatcaaagaccaaaagtagataaaaccacaaagatggggaaaaaacagaacagaaaaactggaaactctaaaacgcagagtgtctctcctcctccaaaggaacgcagttcctccccagaaacggaacaaagctggatggagaatgactttgaggagctgagagaagaaggcttcagacgatcaaattactctgagctacgggaggacattcaaaccaaaggcaaagaagttgaaaactttgaaaaaaatttagaagaatgtataactagaataaccaatacagagaagtgcttaaaggagctgatggagctgaaaaccaaggctcgagaactacgtgaagaatgcagaagcctcaggagccgatacgatcaactggaagaaagggtatcagcaatggaagacgaaatgaatgaaatgaagcgagaagggaagtttagagaaaaacaaataaaaagaaatgagcaaagcctccaagaaatatgggactatgtgaaaagaccaaatctacgtctgattggtgtacctgaaagtgatggggagaatggaaccaagttggaaaacgctctgcaggatattatccaggagaacttccccaatctagcaaggcaggccaacgttcagattcaggaaatacagagaacaccacaaagatactcctcgagaagagcaactccaagacacataattgtcagattcaccaaagttgaaatgaaggaaaaaatgttaagggcagccagagagaaaggtcgggttaccctcaaagggaagcccatcagactaacagcagatctctcggcagaaaccctacaagccagaagagagtgggggccaatattcaacattcttaaagaaaagaattttcaacccagaatttcatatccacccaaactaagcttcataagtgaaggagaaataaaacactttacagacaagcaaatgctgagagattttgtcaccaccaggcctgccctaaaagagctcctgaaggaagcgctaaacatggaaaggaacaactggtaccagccgctgcaaaatcatgccaaaatgtaaagaccatcgagaccaggaagaaactgcatcaactaatgagcaaaatcaccagctaacatcataatgacaggatcaaattcacacataacaatattaactttaaatgtaaatggactaaattctccaattaaaagacacagactggcaaattggataaagagtcaagacccatcagtgtgctgtattcaggaaacccatctcatgtgcagagacacacataggctcaaaataaaaggatggaggaagatctaccaagcaaatggaaaacaaaaaaaggaaggggttgcaatcctagtctctgataaaacagactttaaaccaacaaagatcaagagacaaagaaggccattacataatggtaaagggatcaattcaacaagaagagctaactatcctaaatatatatgcacccaatacaggagcacccagattcataaagcaagtcctgagtgacctacaaagagacttacactcccacgcattaataatgggagacgttaacaccccactgtcaacattagacagatcaacgagacagaaagtcaacaaggatacccaggaattgaactcagctctgcaccaagcggacctaatagacatctacagaactctccaccccaaatcaacagaatatacatttttttcagcaccacaccacacctattccaaaattgaccacatagttggaagtaaagctctcctcagcaaatgtaaaagaacagaaattataacaaactatctctcagaccacagtgcaatcaaactagaactcaggattaagaatctcactcaaagccactcaactacatggaaactgaacaacctgctcctgaatgactactgggtacataacgaaatgaaggcagaaataaagatgttctttgaaaccaacgagaacaaagacacaacataccagaatctctgggacgcattcaaagcagtgtgtagagggaaatttatagcactaaatgcccacaagagaaagcaggaaagatccaaaattgacaccctaacatcacaattaaaagaactagaaaagcaagagcaaacacattcaaaagctagcagaaggcaagaaataactaaaatcagagcagaactgaaggaaatagagacacaaaaaacccttcaaaaaatcaatgaatccaggagctggttttttgaaaggatcaacaaaattgatagactgctagcaagactaataaagaaaaaaagagagaagaatcaaatagacacaataaaaaatgataaaggggatatcaccaccgatcccacagaaatacaaactaccatcagagaatactacaaacacctctacgcaaataaactagaaaatctagaagaaatggataaattcctcgacacatacactctcccaagactaaaccaggaagaagttgaatctctgaatagaccaataacaggagctgaaattgtggcaataatcaatagtttaccaaccaaaaagagtccaggaccagatggattcacagccgaattctaccagaggtacaaggaagaactggtaccattccttctgaaactattccaatcaatagaaaaagagggaatcctccctaactcattttatgaggccagcatcattctgataccaaagccgggcagagacacaaccaaaaaagagaattttagaccaatatccttgatcaacattgatgcaaaaatcctcaataaaatactggcaaaccgaatccagcagcacatcaaaaagcttatccaccatgatcaagtgggcttcatccctgggatgcaaggctggttcaatatacgcaaatcaataaatgtaatccagcatataaacagagccaaagacaaaaaccacatgattatctcaatagatgcagaaaaagcctttgacaaaattcaacaacccttcatgctaaaaactctcaataaattaggtattgatgggacgtatttcaaaataataagagctatctatgacaaacccacagccaatatcatactgaatgggcaaaaactggaagcattccctttgaaaactggcaaaagacagggatgccctctctcaccactcctattcaacatagtgttggaagttctggccagggcaattaggcaagagaaggaaataaagggtatccaattaggaaaagaggaagtcaaattgtccctgtttgcagacgacatgattgtatatctagaaaaccccattgtctcagcccaaaagctccttaagctgataagcaacttcagcaaagtctcaggatacaaaatcaatgtacaaaaatcacaagcattcttatacaccaacaacagacaaacagagagccaaatcatgagtgaactcccattcacaattgcttcaaagagaataaaatacctaggaatccaacttacaagggatgtgaaggacctcttcaaggagaactacaaaccactgctcaaggaaataaaagaggatacaaacaaatggaagaacatttcatgctcatgggtaggaagaatcaatatcgtgaaaatggccatactgcccaaggtaatttacagattcaatgccatccccatcaagctaccaatgactttcttcacagaattggaaaaaactactttaaagttcatatggaaccaaaaaagagcccgcattgccaagtcaatcctaagccaaaagaacaaagctggaggcatcacactacctgatttcaaactatactacaaggctacagtaaccaaaacagcatggtactggtaccaaaacagagatatagatcaatggaacagaacagagccctcagaaataatgccgcatacctacaactatctggtatttgacaaacctgagaaaaacaagcaatggggaaaggattccctatttaataaatggtgctgggaaaactggctagccatatgtaggaagctgaaactggatcccttccttacaccttatacaaaaatcaattcaagatggattaaagatttaaacgttagacctaaaaccataaaaaccctagaagaaaacctaggcatgaccattcaggacataggcatggccaaggacttcatgtctaaaacaccaaaagcaatggcaacaaaagccaaaattgacaaatgggatctaattaaactaaagagcttctgcacagcaaaagaaactaccatcagagtcaacaggcaacctacaaaatgggagaaaattttcgcaacctactcatctgacaaagggctaatatccagaatctacaatgaactcaaacaaatttacaagaaaaaaacaaacaaccccatcaaaaagtgggcaaaggatataaacagacacttctcaaaagaagacatttatgcagccaaaaaaaacatgaaaaaatgctcatcatcactggccatcagagaaatgcaaatcaaaaccacaatgagataccatctcacaccagttagaatggtgatcattaaaaagtcaggaaacaacaggtgctggagaggatgtggagaaataggaacacttttacactgttggtgggactgtaaagtagttcatccattgtggaagtcagtgtggcgattcctcagggatctagaactagaaataccatttgacccagccatcccattactgggtatatacccaaatgactataaatcatgctgctataaagacacatgcacaagtatgtttactgcggcattattcacaatagcaaagacttggaaccaacccaaatgtccaacaatgatagactggattaagaaaatgtggcacatatacaccatggaatactatgcagccataaaaaatgatgagttcatgtcctttgtagggacatggatgaaattggaaatcatcattctcagtaaactatcacaagaacaaaaaaccaaacactgcatgttctcactcataggtgggaattgaacaatgagatcacatggacacaggaaagggaatatcacactctggggactgtggtggggtggggggaagggggagggagagcattgggagatatacctaatgctagatgacaagttagtgggtgcagcgcaccagcatggcacatgtatacatatgtaactaacctgcacaatgtgcacatgtaccctaaaacttaaagtataataataaaaaaaagaattttatcagactgcaaagttagtaatgatgtcaattaaagtagatctgtacttctcatggagaatactcattgcaacaaattttaaatcccaggagagctgctatgtgtgcacatgtgtaaggccactgcagccccaattaagtatatcataattatggtatcacaaatccacactgatacgaaatatgcattaaatggtgctgagaaatttggctcatcacctagatggaaggaaaatgcaagctttccatcactatacaaacaaaattcagtaaataagattgggttgtattttttaaggaatgattgggacttaatatttaattaagaaatatttaatcatgcccttgtttctgattttatacttatagaataaggaatgttccataagctttacgtgtcgtgactctggggcttaataaaaacagatgtatatctgacctttgaagaaaaatatgtagacaggagagatgaagataacatagagaagattttaaagttattaagaattctattcacaatcattgaggaaatatcaattagatatagaacttgaagagacaagaagttacaaatggctaacacacgtatatacaaaattagcaccttgtagttcagtcaacagcaacttccagcaatcaatttaagaagcattgcactgtggtcagatgagggtatgaaatgttggtgtaaaacagtgttttgccttttgagaaaagtaagtaataagagcttttaatatacatacacacgctgacacaatattgcattttttttttttttgaggaacctatgaagcagagtcactaggcataaagcttatggaatactctttaaatcatcctatacaatagtataaaatcagaaacacctgaagtctgacaaggacatgattagatatttccggtgcattattatgta[132 bp omitted]gtgaagccttgtctctactaaaagtacaaaaaattagccgggcgtggtggcacgcgcctgtagtcccagctactcagaaggctgaggcaggagaatcgcttgaacctcagaagtggaggttgcagtgagccgagatggcgccactgcactccagcctgggcgagactccgtctcaaaaaaaaaaaaaaaaaaaaaaaaaaatcgtactttaaagaacacaagaaaaagctcataaaacagcgtttacagaagtatgaactgtttgagtctaaaggtaactccactttcttaaacatattagagggaaatacagttgactcctgaactcaaaagtcaatgctgccagcccctaggcagtcaaaaacccacgtataacttttgacttccaacactcatagcctactattgaccagaagccttatcaacagtcaattaacacataagtagactcacatctatattgattgcattcatgacatatctgactttaattttttaagtatttctaggctgcctggttcatctacaagttgtcatacatctcccccaaaattctccaatatatttatttttgaaacttcatgtataagtggacacatgcagctcaaacctgtattgttcaagggtccactgtaaatctgtttaacacaagtgttttcttcttttaaatcttgtatctaggtgtttttcccccctaagtgaacacaagtagattagggattagtaagttaagcctcaccaagtccaacccttccccaaattcccaaactcttccctcctttgacttctatttcaccattgcctttgagccccatccttgtaactgagagacttccgagttcaggagtcaactgtatttctttctagtgatatgtttgtctaataaagtagttacctttagactcaaacagtccatatttccctaaacactgttgtatgagctttgcttgtgttctttaaggtatgatttttaagtggtttggtaataatgcaccagaaatatttaatcatgaccctctcagtctttaggtgtttctgatttcatactgtgacataggatcattcaaggaaaattccataagctttttgcctagtgatggcttcttagcttcctaaaaaaaaaaaaaaaaatgcaacgttgagtgtgtgttaaaagctcttattacttttcccaaagggcaaaatactttttttacaccaaccttttgtacactcatctgaccacactgcaatgctttttaagttggttgctggaatttgctgttgactgaactataaggtgccaactgaactatgaggtgatctccaacacctgcaaaaaagctgacactacagcattgcacgtcccaagtcggcgttgcatcagattagctgatcaccgcacagttgggcacttcaagcacctgtgaccagactttctcaagcactgagacacaggggaatcacctggggagttatcaaaaaccccagtgtcccgaaatacagacactgattagagactttggaggttgggcccaggaaccagtatattgttccaatcccccctgtaaattcagcactcaaagttaagaatcaatttgtaaactaaaaataacatgttaagacccaccgccccaccccccccatcccccccacccccccgcccacaaccaactgagcggaccccctcctggccaagatacttgaaaaacagaatcattgactatggcaggaagggaggtcaaacctcctcctatctccttcctttcggagcctaggc[132 bp omitted]acatggcgaaaccccatctctactaaaaatacaaaaattagctacgtatgctggcgtgtgcctgtcattcctgctacttgggagtctgaggtgggagagtcacttgaacccaggagacagaggttgcagtgcgctgagatcacaccactgcacgccagccttggcgacagagcgagactccgtctcaaaataaataaataaataaaaatattcttttcatctctaacactttatacatcacatagaagaatagcatccataaggctatgatgacgagttagttaggtttaaacactccacccacagtgcacatacacttcaaaacatcatgctgcacacactacatgcaattttatctgtcaacttaaataagtttatcaaaaaaaaaaaaagcatgacccaaatttactcatgtgaacttgaaaaaggtaacagagcttggcctgcccttaggaactttagtcattttattccccaatcatattatttccagctcctaaccaaagagaaagctaaagaaccaatgtaacataataaaaaaagaccttaaaatccaaacaaacaaatcggccagaaaggtaactcaccaaccctgccaccaggtctccttggctggtcgaaagcaaacaagctaggcagcgggaagaaaaaggcggtgcctgcccggtgattagccagctgactcctctcttgattggccaaggtgggttcttgatgaccttcgcgatggaggggaaatactgctgcacctgcgtgtttctgcccagatgccccaattgtctttcttcacccaggactaaacagggtctgctgattaggagacggtccacaccccgtttatgatgttggagctcatggggcatctgaccaagaacctccaaaacaattgacttaggcagtgccgggggaaagaagttttccaccaataatctcaatttcggataaccatctatacagtaagctccatgaggggaatacgctgtctagtctacataaccacctggcaaggatcctttcaaatctgagggaggccataaatatttgtggaacaaatgcaaccaaaggcatgtttaacaggtgatagaatttgcggaggcacgtcctagatcctccacccggggggcccgtcttggctgcctattggaatcacctggagacctctagtgaagactgatagctcagtcctatgcgcaggtatctgctttagtcaggagggagtatgctctgggtatgactgatagagctcctcatattgaacagattacagaagaataggggcatcttcataggtgcaaaaggggaaatataaaagagtctatatctattcatggttttagatgtatctttgtaagttaggaaataaaagaatttccttcacccagtaaagggttccaaaaaagcaagagcaaacaaaaatctcataatggacgggaaagtgatgaaagaataccttttacaataagatacaagataaacaaggcctccgtcaccactcttatttcaacatagtgcacctgttcactgggacaagaaaacggatctgaaagaaagaggcgaaattatcatattggagataatttgaatatccatgcaaactctctccccttaaatctattgataaattgttaggattcaaagcagctttggtgaatataaatcaacatacaaatctgattgtgtttctctaaaaaaaaactaattggaatttaaaattttaaaggatgccacatgcagttccaagaaaaatataaactagaaataattcttataagagattgtaaatcttattgaatgatatacaatgttattgccatatacaaaatccttaaaaatgaaggataacattacattcttgtacaggaattattattatgaagatgttaatatgctcccaaatagacctttatattcagtaaaacaataaaatcccaatagaaattttcatatcaaaatataattctgaaatgtatgtggaaaatagaagggactagtacaagccaagagacgcctgaagcacataggtgggtgggaggtgggaatgatgattgagttggacctaccctataaagatttaatttaaaaactatggtaattaagacttattggttggccgggggcggtggctcatgcctgtaatcccagcactttgggaggctgaagcgggcagatcagaaggtcagaagatcgagaccatcctggctaacacggtgaaacccccgtctctaccaaaaatataaaaaaatttagccaggtgtggtggcgggcgcctgtagtcccagctactcgggaggctgaggcaggagaattacttgagcccgggaggaggagcttgcagtgagccgagatcaggccaccgcactccagcctgggcgacagagcgactccgtctcaaaaaaaaaaaaaaaaaaaaaaaaaagacttattggcacacggatgaacaaataatagtgaaaaaaacatagaacccagaaaccaatgtaggcaaatacgaaaagctggtttataacagatttctgggcagtggcgtaggtgaactattcattaaatggagctggtgccatttgtatttaaatgaaaaaaaaaaaatggatcccttctccctaccttagagaaaaataattacaagtgacttaatacttctgtgtgaaattcaaaactctatcatattttaaaaggcaatattagatatcttcatgagttggagtagggaatgatttttgtcaacaagacctcacatttataaaacataaagtacattttgatcaatttgatttcatttaaaataaaaactcttcagtgaatggttcttatataacaaaagctacaaaccacaaactaggaggagatatatgaaaatacgtgcatcacacataactgaccaaaccactttttcagaaaaggtaaagcacttcttcatgcaaataaaaacagaacacaaccaatagaaatacaaggaaaacaatgaaaaggtatttcacaaaagaggcaacaaatggctcacaaacatgagaacaatgttcaagtatattaataatcagataaaagcaaatgaaaacaacaaaatactttttccaactaatatttggtgactactttaaaatgtcaacaacatcaggagtaggcagtaaggtgcagctatggggatattcaactgtgcatgatgctaatgtaattagtgaaaccacttctgaagaggcaactgaagtcacctgtgcctcagggactcagtcattccactcaggtaatccaaaagtcctgtgggctcactgatgtgtgcaagaaggttcaaaacagcattgttcatattggcaaaaactgagaaaccacccaaccacctatcactgacagaatggatcattaaatggtgacctagtcatacatttaaataccgtgaggcaagacctagaaatgaaccgcagctataacaaactcgcattgattaatctcaaaaacataataagtgaaaagaatcaagtcacagaatgatacactataattcgaaaatgaggaaaacaaaacatatctcttaggggaacatgtatcaccaggaaaaataaaaagaaaatcgaagggaatgaagttcacttcacaactggaaatttattttggtgggaacccctgaggatgcaacgggcatgctcttatgggtacatgagtctgcaaaggtccccatcatgtctgcttcccaatctaggttctggaccacagagacttgtgttatggttacagtaattccttaaagttctcattatgtttctctgcactccttgatgtgtatatttcaaaaccaggatcatcaccatcgtaacactgaactcaggattcttataaggaggaactaaaatggtgattgtaaaaggatagctcctaggacactgaggtttggcgtgaacccagaagatgactgtaacgattgtagggaagctggaatagcaggaaaaccatgcccaatgatgaaatctcgaccttgcgtctaaaaaacttagcgcctgttctgcctacgcagaaagaca[136 bp omitted]accctgtctctactgaaaatacaaaaattagccgaggccaggcacagtggctcatgcctgtaatcccggcactttgggaggccgaggcgggcagatcacttgaggtcaagggttcgagaccagcctggccaacatggtgaaaccctgtctctactgaaaatacaaaaattagccgaggccaggcacagtggctcatgcctgtaattccggcactttgggaggccgaggcggtcagaacacttgaggtcaagggttcgagaccagcctggccaacatggtgaaaccctgtctctactgaaaatacaaaaattagccgaggccaggcacagtggctcatgcctgtaatcccagcacttcgggaggccgaggcgggcagatcacttgaggtcaagggttcgagaccagcctggccaacatggcgaaagcccgtctctactgaaaatacaaaaattagccgggcatggtggtgtgcatctgtaatcccagctactcagcaggctgaggcaggagaatctcttgaacccgggaggtggaggttacagtgggccgagatgacgccactgcactccagcctgggtgaccgagtgagaccgtatctaataataattaataatttcttcttgcacgacaggtttagttacggcagaaagatgttgtgccacacgaacattcttcaaggagtttagcatgtaggaaggaattagacatttaaattataaacagagtcaccccaactctccaaatgaaccattttggagagactggaggagcatccctgcagccgtgagccctgggaattctcaataggaacctccagcttgaaatatcccccgctctatacgacaccaggagcaaaggtctagaacagcccctcaaggggcggtgggcgtttcgcttcacatattttctggatctgttcatcaaaagccctctgagccaatggcaagggagcaattcgttggccaatcaaatggcaccacggatcttttcttcccgcttccagccgccaatcattaaggaccaggaaggcgtggagcggtgagtcagcgcttcgtgctgggctgttcgtctcttctatgtgctgatttcctgggttactttgggtcttccttttctttctcccttttaccctgtctcctttcttgaggctgatcgatcacagccaggcctctccattctatttacccagcgttttccttctctccagttagtggggtagatgaacgccctgtgtttataaggtgcctcccaggagcctgagacctgtgagaagaatggggggtggaggtgggggagactcgtcacgaagggagaccttggagcttcgagggtgggaatgttcttattagattcttcatctctgttgacacaaacatgtaggagaagctggagaacatagacagggatgaggtaaggggggggacttcccatgaaaggtgggacccaagccctctctgctcttgtgagcttgctctctgacctagggcagaaacgtctttgatactgtaattccagaatgtgatttaaaaagaaaatcacacttctagttgactcatactaattatgtatattagctgcagagagatgtgttggtacatgtatacgtatcattaaatcagggtaatgagcatatccatctcctcatacctgtatcatttctttgtgttaggaacattcagaatcctctccttaggtgggaggagggagagggtcaggaaaagatagctatggggtcctattcttaatacctgggagatgaaaaactgtacaccaaacccctgtgacacgagtttacctgtataaccagtgtatatgtacccctgaacctaacataaaagttagaaaaaccctcgaaaataataagatattaagtatattcaacctatagtgctactgaacaccagcacctattcctacctacaggtgtaacttggtatccattagccaacctcttttcatcccccttctccaattatgccatttgtttagactatgaaacgtatatagaaagaatatttatctttctatatcaataaaagttggtttttactgttaagggttgaattgtgtcccaaccctaaaaacacacacacacacacaaagtcctaacccctttatagggtgacaaaataaggttgttgcagatgtaattagttaaggcgaggtcatactggagtgagtggcccccctaacttaatgacgggtgtccttatgaaaacggccacatgcggctgggtgtggtggctcatgcctgtaacaccagcactttgggaggttgaggtgggtggatcatctgagctcaggagtttaagacaagcctggaaaacatggcaaaaccctgtctctactaaaaatacaaaaatcagctgggtatggtggcaggtgcctgtaatcccagctactcaggaggctgaggcaggagaattgcctgaacccaggaggtggagattgcagtgtgccgagattgcaccattgcactccagcctg[139 bp omitted]aattagccaactgtggtggcgcatgcctgtaatcccagctactcaggaggctgaggcaggaggattgcttgaacctgggaggcagaggttgcagtgagccaagattgcgccattgcattccagcctgggcaacaagagtgaaactccatcttagaaaaaatggccacatgaaggtagagacaagcagaatggcatgtgacaaagtcagagtgaaattacatagctgcaaaccaaagagtgacacaggttgccagcaaaccacagaagccagtaagaggcaaggaagggctcccctgggtttcagagagagcagcaccctgccaacactttgattttggacatctaggctccagaaccatgagacagtaggtttctgttttaagttacctagtttgtggtacgttgtcatgccagcccaaggaagctagtacgctattaaaagaaaaaaatgatgtgattttacacttagagaacagcttcaagaatatatccttaggatcaccaaatgttaaaagtttaccttatatggtgtccctctactcttatataagtatttttcctgatctgttcaagatttgtacacattgtacaaatttacatctaataatttaccctaaatgcttcagggtttatcttctaaaaataaaaataaaagtaagctcttttgataaccacactatataaaaaacaggaaattaatagaatgatattatctaatgtacagatcttacacttaatggactttttaatttttgcatttgttttcacaagtagaccgaacatggaaattcttacactaagcctgttttttttttttctttttttaaatttaagttttgggatacatgtgctgaatgtgcaggtttgttacataggtgtacacgtggcatggtggtttgctgcacctgtcaactggtcatctaggttttaagccccacatgcattaggtatttgtcctaatgctctccctcccctttcccacccctcacccacgggcctcagtgtgtgaatgttcccctccctgtgtccgtttgtgttcttattgttcaactcacacttctgtgtgagaacatgcagtgtttggttttctgttccagtgttaatttgctgaggatgatgtaaacctgttttcattatctaacctatgcctcagtttgagtgtgtgtgtgtgctctttcacacacatatacacacatgcttatgctctcacacacacatacccacacacatgctctctcttagattctggaaaaataatttttatttaaattttgacataatttgctgatgaagatgtttgagcctgaagtcttctgtgggggaagagttaaaaaaaaaaaaaaaagctttcaaaacttcacacacacaaaatagatgaaagttgtcattttctaagaatttatatatttgaacaaaattatcagttttattggcataaaaatggtaatagtctcaatttttgatatctgtagggtatgtagtggtgtcttctgtttctggtattaattgctcatgtcttcttattcatcagacttgttgggggttatccagtttgtattttcaaagaatctacttttgacagagtcttgtattttaatttttatttcattgattattttttctactttcttttggtgtgttttgctttttatctaaatgtataattagtttatgaattttcaaccttccttatgcctttgaagtagcacatttttccagctcctgatttagctgtatttcactcacttcatatgcaacattaaatattcagttcaaaatcttatatccgatattttctctttattcatagattacttagaagtatgtttcttaattttggaatgtccttcatttcattgtcaaattctgacttaaattatgatcagaatattctgtgtaacttatattatttgaaatatgttgaagcttgccctgaggatcagtatatagctgacattggtagctgattcgtctatcttatagtgttttttccatttattgaatgaaaaggtctgtgtccacaaggtaaaatttttccattgtttttaagccctttattttctttttaacttgtttgtttaattgctggaacaaattgataaaatatcctgctatgattagggacttacctaattctccttatggtgctgaccattgtcgggggtgtgtgtgtatagacatatgtgtatgtgtatgtgtgtgtgtgtgtgtgtgtgtgtgtgtgtgtatacatattttcttttttctttttgagacagagtcttgctctgttgcccaggctggaatgcagtggtgccatctcagctcactgcaagctttgcctcccgggttcaagcaattctcctgcctcagcctcccgagtagctgggattacaggtgcctgccaccacgcccagctaatttattattttttattttttggtatttttagtagagacggggttttaccatgttagccaggctggtctagatctcctgacctcgtgatccgcccacctcggcctcccaaagtgctgggattataggcgtgagccacagcacccggctgatcattcgtatattttaaggctgtgttattgttgcatgtatgattataattgttctctcttcctggtaatttgagccctgtggttatgcagcatctagatttctcaccaatgttttggcttggggtctgcttttctggtatcaatattatgacaacagatttttttaaaagcctggaataattcaatatcttttccttctaattcaagtcgtgcaataaatggaatggatgaagagtttggtgagtaagatgggttatcataccttacgtatgcatgacatgctattttgttcagatttcccatttaaaaatttcttaaattgacatataattgtacatatttatgggatacagtgtgatgtttggacacatatatccattgtataatgatccaatcagggtaattatcatatctgtttgtttagacacatttctttgtagtgatactcaaaatcttctagctattttgaaatatccgccacactgttatttgctttagttaccctaatttgtaagagaacactagaacttgcgctttctaactgtaagcgtgcctgttgaccaatcgctcctggtctcccgttactctcccatcccttccccagcctctagtaaccactgttctactctctacttctataagttcatctttttagattccccatataaatgagatcatatggtagttttctttctgtgcctgccttattttacctcgtgtcctccacgttcatccaggttgccacaaatggcaagatttcattattttttatggctaaataatattccattgagtatatataccacattttctttatgcattcatttattgataggcacttagtttgtttc[133 bp omitted]aaccccatctctattaaaaatacaaaaaaaagttagccgggcatggtggcaggcacctgtagtaccagatacttgggaagctgaggcaggagaatggtgtgaacctgggaggcagaggttgcagtgagccgagatcgtaccactgcactccagcctgggtgatagtgcgagactctgtctcaagaaaaaaaaggtgctgcaatagacatggaagtaaggatatctctttgacatacgaatttccttttttaaagaggtatatacccagcagtagaattactgggttatatggtaggttctattcttaattgttttagaaacctccatactgttttccatagtggttctgctaacttacattcctaccaatggtgtgtaagagttgccttttctctgcatccttgccaacatttgttattttctttagccattctaacggggtgagttaccccagattttttaggttcaaatttgcatgtttagtctttcaactttcgtttttccgttcttagttacctctttaaagagcaagtatttggtttttgtatttagtctcaccatctttgcctctgtaccattgaggcaattattctgtgtaattactaataagagttcgagttgaccatcacttttttatttaccttatctgttctaggttcctatttctgtccttctttattttttaggttagtttgtcatttttcctcttctctatttactttggcagacaaacttttttatggttatatcagaattctatcagtgggcttatcagaatttcttatcaaatttttacttctgtcatcttcccagagaagaacattagagcacttgatgtcctttttcttttttttttagatttacgtgccagctgtgataaattttaattctattttctgtctcacaagactgactctataaagcaacttgtcttctaattgactgtggcatctcttaattttcacctgcaataattttccttctctccaatggtcaattttcaaaatttcctatagtgtaagtcttctgttggaaaatttgtcatttatctgcaaatgtctacttttatttctttttattttatttttatttttga[155 bp omitted]gtatttagtagagatggggttt[134 bp omitted]acttgagtcagcagctatttgttttgagcaccttgcatggttgcttctttagtttcttctttctgtagcacctgatcaggtcagctgtcaacataatggcacaaccgttcaaataaattattgtcctccccttgccttacccccactctggaatgctttcaagattttcccttttgtgtaacttctttatgttctaatgtcattatgtttccctataatgtgtctagacatgggtttgttatttatactcttggactttattgggcttcttaattagtagattgatttttttttcattggttaatagaaacatccaggccaggcacagtggctcacacacctgtaatcctagcagtttgggaggcagaggcgggtggatctcctgaggtcaggagttcgagaccagcctggccaacatggtgaaaccctgtctctactaaaaatacaaaaaattagccaggcgtggtgatgggcacctgtgatcccagctgctcaggaggctgaggcaggagaatcacttgaacctgggaggtggagtttgcagtgagctaagattgtgccactgcactccagcctgggcaacaagagtgaaactgtctcaattaaaaaaattataaaaagaaacatcctagtagcaatcttatattaggttggtacaaaagtaattgcggtttttgcatttttttcatggcaaaaaccacaattacttttgcaccaacctaataaaacatactacatctggtccacagtctcttttctccttttggggagccagtaacaagtgttagcccttttcatccttagtctcttgtcctctcttctgtgcttttcatctttttatctctctcttcttggatgacttctctttacgtgtcttctagaccactaattatctctgtcaaatctgatactaacacattgtattagcttcctggggctgctgtaacaacataccacaaaacagacagcttaagcaacagaaacttactgtctcacagttctgaaggctaataagtccaaaatcaaggtgctggcaggcgtaatttcttctgaagactgtgagggagaatcagtttattcctctctattaacttctacttgctttaggtgtgctttggttagtaagtggcattttccctgtggcatggtatcctcttccctctattcatatgtgtccagattttcccctttcttttttctttttatttttcgagatggagtctcactttattgcccaggctggagtgcagtggcatgatctcagctcactgtaacctcccgggttcaagcaattctcctgcctcagcctcctgagtagctgggaagacaggcacataccaccacttggctaagttttgtatttttggtagagatgggattttaccatgttggccaggctggtcttgatctcctgacctcaggtgatccgcccaccttggcctcccaaagtgctgggattacaggtgtgagctactgtgcccggccagattttcctctttcaataaggtcaccaattatattggatcgggggcccaccctgctttagtatgacctcatcttacatgttccagtacagctaattgcatctgcaaggatgctatttccaaacaagcccagacttcagttgcactttgtgacctccagtgtaactcattgtatctacgagtatgctattttcaaaaacttcatacttcagcatgtaacttttgcagggggacatacattggatgcagaaaagagtccctggtgatttttgtggtggtagtggtggtagaggagtgtgtgtgcgtgtgtgtatgcatgtgtgtgtgtgtttgggggaatatttaaagttccatctgtagccaatctgaatgcagtctttcccctcactttcagaggatctcttcccagagccggaggtattaatatttcagcctgtggcaagaggctacacttttttttaattattatactttaagttttagggtacatgtgcacaacgtgcaggtttgttacatatgtatacatgtgccatgttggtgtgctgcacccattaactcgtcatttagcattaggtacatctcctaatgctatccctcccccctccccccaccccataacagtccccagtgtgtgatgttccccttcctgtgtccatgtgttctcattgttcaattcccacctatgagtgagaacatgcagtgtttggttttttgtccttgcaatagtttgctgagaatgatggtttccagcttcatccatgtccccacaaaggacatgaactcatcattttttatggccgcatagtattccatggtgtatatgtgccacattttcttaatccagtctatcattgttggacatttgggttggttccaagtctttgctattgtgaatagtgctgcaataaacatacgtgtgcatgtgtctttatagcagcatgatttataatcctttgggtatatacctaataatgggatggctgggtcaaatggtatttctagttctagatccctgaggaatcaccacaccgacttccacaatggttgaactagtttacagtcccaccaacagtgtaaaagtgttcctatttctccacatcctctccagcacctgttgtttcctgactttttaatgatcaccattctaactggtgtgagatggtatctcattgtggttttgatttgcatttctctgatggccagtgatgatgagcattttttcatgtgttttttggctgcataaatgtcttcttttgagaagtgtctgtttatatcctttgcccactttttgatggggttgtttttttcttgtaaatttgtttgagttcattgtagattctggatattagccctttgtcagatgagtaggttgcgaaaattttctcccattctgtaggttgcctgatcactctgatggtggtttcttttgctgtgcagaagctctttagtttaattagatcccatttgtcaattttgtcttttgttgccattgcttggtgttttagacatgaagtccttggccatgcctatgtcctgaatggtaatgcctaggttttcttctagggtttttctggttttaggtctaacatgtaagtctctaatccatcttgaattaatttttgtataaggtataaggaagggatccagtttcagctttctacttacggctagccagttttcccagcaccatttattaaatagggaatcctttccccattgcttgtttttgtcaggtctgtcaaagatcagatagttgtagatatgcggcattatttccgagggctctgttctgttccattagtctatatctctgttttggtacactctgatcttgacactgtctccacatcaagaaaagtccaactctagttgcctgcttctccaagatggtctcagagcaaagcaccagcaatgttcttgcccaaagtcattctttaagtcagtggttttcaaatctgggcatgcgtcaaaattaactgacattatatataactgatgttatataacagatatataactgatattatatatctaatatcatcactaactatttgcccaaaattaacagatggctgtgccctaccctcagcatttagtgtgtctagggaaggacctggggatttgcatagcaagttaccagttggtgctgatgttccttggagaagtattgccttaggtgctcagtggtggcctcaggactcagatacatgttcctataattaagattttactaaaagtaggctttttaagactattggcaaaagcacgcaggggagaagccatgaaggtcacctttccatcatcatattctcattccgaatactgcttaataattttccctaatttttgtgggttttatttatttattttgagacagtcttgttctgtcacccaggctggagtgcagtggcacaatcttggctcactgtaacccccacctcccaggttcaagagattctcatgcctcagcctcctgagtagctggggctataggcgcctggctactttcccctaatttttggatcttagatgctattaaattttttttaaatttttctccaaattacctattttatttgaggggggggcagcaacattctgcctaatggccacccatgaataaaacagctttatttttattttccactgtataacttaacccttttattgactttgctattgatctctaatttcattgcccttaagacaaagaagatgactttgctactgttggctttttgtttttgaattatgatttcctttaaagctcagagcataattgattatcatgagcataattacaagctaattgattatcatgaatgttccacgtatgcttgaaaagaatgttctcttgtgtgtaggattccataaatattcataaaatgtgttgatttttatatatctaatatgaataactatttgccctatgtttttagtatcttttaaaattttagacttgttttagacacagaaaagtttgcaaaaatagtgcagagagttcccataaatcctgtgccacatttctctagtaacgactttcgttaccatggtacatttgtcataactaataaaccagtattaatagattattaactaagattattctttcttcagattcccccctttttacctaatatccttttttttttttttttgagatggagtctcgctctgttgcccaggctggagtgcaatggtgcgatctcagctcactgcaacctctgcctcccgggttcaagtgactctcctgcctcagcctcctgagtagctgagactacagacacctgccaccacgcccggctaattttttaatatttttagtagagatggggtttcaccatcttggtcaggctggtctcaaactcctgacctcgtgatctgcctgccttagcctcccaaagtgctgggatgacaggcgtgagccactgcacctggcccctaatatcctttttatgtgcctggacctcatctaggatcccccactgggtttcattgctgtgtctccattgagttctctaaactaggaccactctcaggatttccttgttttcagtgatcttgaacgttttgagaagcactggtcaggtatttgtgggacatcattcatgttgggtttgtgtgacgtttatctcattgcgagactggggctttgaggaggaagaccacgaaggaaaggtgcccttcccatcatatcatatgctaccacttgctacccatgttggccttgatctcctagcttaggtgtctggctggtttctccactctgaagttaatccctacccctttttatactatagtattgtatactatactatacgatactatagcatactatactatacattgagatggagtctcgctctgtcgccaggctagagtgcagtggcacgatctcggctcactgcaacctccacctcctgggttcaagtgattcccctgcctcagcctccagagtagctgggattacaggtacccaccaccacatccggctaattttttgtattttagtagagatggggtttcaccatgttggccaagatggtctggatctcctgaccttgagatccacccacctcggcttcccaaagtgctaggattacaggcgtgagccaccatgcccggctgtactatattctttaaaaagaagtctctatgtacaacccacatgatacggtttggctgtgtccccacccaaatctcatcttgaattgtggctcccataattcccacatgtggtgggagggacccggtgggagatacttgaatcatggggatggtttcccccatactgttctcctagtagtgaataagtctcgtgagacctgatggttctataaggggaaacccctgtcgtttggtcctctcttgtctgccgccatgtaagatgtgccttttgccttcccccatgattgtgaggcctccccagccacatggaactgtgggtccattaaaccacttttttctttataaattacccagtcttgggtaatgtctctatcagcagcatgagaacagactaatacaccacacttaagaggtggggagttatgccgcatctccttaaaggggaagaatccatccatctaagctacttggaattcttcttcttgctaaagttgttacagttttagctattggaggctctttcagcctgccctgggtttctttggttaggaagtggtcttagaaaccaagagctgatctggacactgggtgtatcgattgccactagggtatctgttatgcttccaggcccttgcatgagtgtgactgtaacagtaccgtagactaagactatacttccagggatcatttctatagttcactgcaaaatgctgcagactggatggcttaccaacagaaatgtacttcctctagttctggaggctggaagttcaaatcaaggtccagcagagtcccttcctgatgaagactttctggattgtacacagctgccttctgtgtccccacataatagagtcagaggaagagatggggagaaagagagccagggagggacttccagttgttccagcaccatttatggaagagacgatctgcctccattgtgcctttgtcaaaatgagttggctacatttgtggggcatgccttctctattgtttactgagaaaaatgtaatttctatatttacagtgtaatttctatatttaaaagtaaaaatgtaatttctgtagctgcggtgtaatttccaaagctgcggtgtaatttccaaagctgcggtgtaatttccgaagctgcggtgtaatttccgagactgcggtgtaatttccgtggccgcggtgtaatttccgtggccggcggtgtaatttccgtagccgcggtgtaatttccgtagccgcggtgtaatttccgagactgcggtgtaatttccgtagctgcggtgtaatttccgagactgcggtgtgatttccgagactgcggtgtgatttccgagactgcggtgtgatttccgtagctgcggtggaatttccgagactgcggtgtaatttccgtggctgcggtgtaattaccgtagctgcggtgtaatttccgtggctgcggtgtaatttccgaggctgcggtgtaatttccgtggctgcggtgtaatttccgtggctgcggtgtaatttccgtggctgcggtgtaatttccgtggctgcggtgtaatttccgaggctgcggtgtaatttccgaggctgcggtgtaatgtccgtggctgcggtgtaatgtccgtggctgcggtgtaatttccgaggctgcggtgtaatttccgaggctgcggtgtaatttccgaggctgcggtgtaatgtccgtggctgcggtgtaatgtccgtggctgcggtgtaatgtccgtggctgcggtgtaatttccgtggctgcggtgtaatttccgaggctgcggtgtaatttccgaggctgcggtgtaatgtccgtggctgcggtgtaatgtccgtggctgcggtgtaatgtccgtggctgcggtgtaatgtccgtggctgcggtgtaatttccgtggctgcggtgtaatttacgaggctgcggtgtaatgtccgaggctgcggtgtaatgtccgaggctgcggtgtaatgtccgtggctgcggtgtaatgtccgtggctgcggtgtacttcccgaggctgcggtgtactttccgaggctgcggtgtacttcccgaggctgcggtgtaatttccgaggctgcggtgtaattcccgaggctgcggtgtaatttccgaggctgcggtgtaatgtccgaggctgcggtgtaatttacgaggctgcggtgtaatttacgaggctgcggtgtaatgtccgtggctgcggtgtaatgtccgaggctgcggtgtaatgtccgtggctgcggtgtaatgtccgaggctgcggtgtaatgtccgtggctgcggtgtaatttacgaggctgcggtgtaatgtccgtggctgcggtgtaatgtccgaggctgcggtgtaatgtccgaggctgcggtgtaatgtccgaggctgcggtgtaatgtccgtggctgcggtgtaatgtccgtggctgcggtgtaatgtccgaggctgcggtgtaatttacgaggctgcggtgtaatgtccgtggctgcggtgtaatgtccgaggctgcggtgtaatgtccgtggctgcggtgtaatgtccgaggctgcggtgtaatttacgaggctgcggtgtaatttacgaggctgcggtgtaatgtccgtggctgcggtgtaatgtccgaggctgcggtgtaatgtccgtggctgcggtgtaatgtccgtggctgcggtgtaatgtccgaggctgcggtgtaatgtccgaggctgcggtgtaatttacgaggctgcggtgtaatttacgaggctgcggtgtaatgtccgtggctgcggtgtaatgtccgaggctgcggtgtaatgtccgtggctgcggtgtaatgtccgtggctgcggtgtaatttaccgaggctgcggtgtaatgtccgtggctgcggtgtaatgtccgaggctgcggtgtaatgtccgaggctgcggtgtaatgtccgtggctgcggtgtaatgtccgaggctgcggtgtaatgtccgaggctgcggtgtaatgtccgaggctgcggtgtaatgtccgaggctgcggtgtaatgtccgaggctgcggtgtaatttccgaagctgcggtgtaatttccaaaaatgtaaagtctatatttgcctggatattgaggctatgtcaggtgactataggattcttgtatcttctggattattgtatctctgattcccccatccattattgagactttcatgaccatttgaatgagaaggtgagatgaatgtaattaaataactttccgccttcattgccatccccccagtactagcaagatactatataatggtaatcttgatccatttatttgtaataacttggcactgtcctgaattttctacaggttttatttatttattgttcctggtcactgtctctttgaggattggtatctctgctccagaaaagatggcagcctctttcttctctgattttggtcttatgtggtatctggaggagctcaaaaaggaggagttcaggaaatttaaagaacatctcaagcaaatgactttgcagcttgaactcaagcagattccctggactgaggtcaaaaaagcatcccgggaagaacttgcaaacctcttgatcaagcactatgaagaacaacaagcttggaacataaccttaagaatctttcaaaagatggatagaaaggatctctgcatgaaggtcatgagggagagaacaggtgagggagtctgggaagggggaagccttcttataatgaggactatgtcctaattttggtgagtggtctctgcctgtctacaacaggacctgaatgtgctatgggaaaatattaggtttttttttttttttttttggtagacggagtcgcactttgttgcccagacagtgcagtagtgtgatcttggctcaccgcaacctccacctcccaggttcaagtgattctcctgcctcagcctcctgagtagctggaattacaggcgcctgccaccatgcctggctaatttttgtatttttagtagagatggggtttcaccatgttggccaggctggtcttgaactcccaacctcaggtgatccacccatcttggcctcccaaagtgctgggattataggcatgatccaccatgcccagcctgaaaatattgtccttgtaggcaggaaatggtctcttagacgtggtggttacatgtgggtaaaatgtcagtggctattatgtcctaacctgtattgtacctttatctgggtcaccaatgatttttaccctaagctgagaacttgcagtcaagccagaaactctgtgaggtgaagtcgttgcataagaactatgcacctgacttatttgcaagagcaattaacacctgcggtagaggatacagtgaactgaggttgactggtgtaatcatgtatttagccaaagttcacatcagacaagcaatgatctataagcaatatggcttttagagtcacatttgtatttatcctggcataaggtgttaactgttactttgcacatttgcgttatcaatggcaggatatagctctttcaactttactgccaaattgtttttctttgttgttgttcagtgtcttactgtgatgtgcctggatgtggctttgttttcatcctgattgggattctttaatattcttgcatctgaggttcagtaactttcttcagttctcaattttagccattgtctgtgtattccattcttctgtttattcttctgggactccagttacacctactggactttcttgtttgtttgacacagggtctggctctgtcacccagggtggagtgccgtggcatcatcacggctcactgcagcctcaacttcctgggctaaatgatctgccacctcagcctcccaagtagctgggactacaggtgtgtgccaccacgcttggctaattgcacacctggctaaccttttaaaaaaaaattgtagagatgagctctcactatattgcccaggctggtctcaaactcctgggctcaagtgatcctcctgccttggcctcccaaagtgctgggattacaggcctgagccaccatactggcctagactcactctttctttctctttctcttttcctttttctttctctttctctttctctctctctctctctttctgtctctctttctctctctctctctttctctttctttcttgctgtctctttctctctctcgttctgtctttctctctcttcctctctctttctctcttgctatctctttctctctctctctctctttctctttctttctctttctctttctctctctctttctgtctttctctctatttctctctttccttctttctttcttctttgatacagagtcacgctctgtcgcccaggctggagtgcagtggtgcaatctcggcccactgcagcttccacctcctgggttcaagtgattctcctgcctcagcctcctgagcagctgggatttcagatgcccgccaccacacccggctaatttttttgtatttttagtagaaacagggtttccccatgttggccaggctggtctcgaactcctgacctcaggtgatctgcacacctcagcctctctaagtattgggattacaggcatgagccaccatgcctggccttgatttcttaaatttagttcacatgttttatttatgcagtttgcctttttcacagacttccattttttctcaatatttattccatcttctattttattgagcattttaaattattttaaaatttgcctgaagattttaacatttataggtctgtttctactgtttctttttctctttatctggtcatacagtctcctagtatgtccggtaattttgagtgccagattttgaatatgagacattgaaaatgttaagaatctgtaatatcttgttccagtgaaattggaattgattctggtagtagttacagggaaatttccttaatattgaggattaaaataattggtttgaaataaaataatttgagagtttccatttttggcgatgctagcctttcttgctcattttcttgatttggaacatcacttggaaaaaacccctcccagtccaatttttttttctttgagacggagtttcactctttcacccaggctggagtaaagtagcatgattttggctcactgcaacctcactgaaccccccaggttcatgcggttctcctgcctcagcctccggagtagctgggattataaggcgctcaccaccacgcccagctagtttttatatttttagtagagacgggattttgccatgttggccaggctggtgttgaactgctgacctccggtgatccgcccgccttggcttcccaaagggctaggattacaggtgtgaaccaccacacctggccacccagtccaaatttttaaacaaattcccccatgtttcctggagtgttttggtgtcacacgctgaggtctcagctaccctggaagctgaggcaggaggatcacttcagcccaggaggatgaggctgcagtgagctgtgtttgtgccactgcactccagcctgggtaacagagtgagaccctgtctcaaaaaagtaatttatataaagaagaacattctttgcacatggaaccattttagaatattgctaaaataaaatgtaagcaggtctaaagttagatcttccactgggtacttacacttctctcttttcacagttggtttgaggttgtacccacttaattccccttatgagcaaccaaacatgtcaccgaaatctccagaacagctgagaagaccaggaaagcaggaagccattggggaatgggcaaacaacttagcttaagatgctaataggatcttcaccaatgtcagatggcattttcaccagttagggacttcaggggactgaaagattgggggaatcccttgttctccccaaaaacttaaggtagcattacctactgtcagcagtctgtgggcactggattatatctttcacctgcatccaatcaaatccagtaactattatgcggggcatagggaaaatttcccatctacaactgccccctacatctccagtccatcagcagctactcacttgcagaatataaacatcgtactagttatttaaggaacagataactgtaaaggagttttcggcctggctgaaggatcagcctctaggctggtgctccagagatgactgtaagaactatagtatcagggagctgctgcctctcctgcaaagaggaaagtgggagatgggaagctcactgttagaactgtggctttagaaatacaccacgacagctatgattcagaaatcgggaagctcaccagtgtagcagctgcttaaaatcaatgaccacagcaactggttttagttttcgagacagtctcgctctattgccagggctagattacagtggtgcaatctctgctcactgcaacctccacctcccaggttcaagcgattcttctgccctggcctcccgagtagctgggattataggcctgtaccaccacgcccagctaatttttgtatttttagtagagatggggtttcaccatgttgaccaggctggtctcgatctcctagcctgaagtgatctgcctgcctcagcctcccaaagtgctgggattataggcgtgagccactgcgcccagccaactacagcaactggagacaagccttctgttacagaagagtccagcgtctgtgtgttcatggaagctggcagcaaaacaggcagaagatagactccactccccttccccttccagtgtcatgagagtgagggccaatcgcagaacttaatctgtaccttgatcttagctacgaggggttgtgggatgcgtagggcttggtcatcactgttgctggatcttttttttttttttttttttttgagacggagcctccttctgttgcccacgttagagtacagcagtgccatctcagctcactgcaacctctgcctcccgggttcaagcgattctcctgcctcagcctcccaagtagctgggactacaggcacacaccaccacgcccggctaatttttgtatttttagtagagacagggtttcaccatgttggccaggatggtcttgatctcttgacttcatgatctgcccaccttggcctcccaaagttctgggattacaggcatgaaccactgccccggcctgttgttggattttttgattggcttttcttttgagaattctgccattgaaagaaagctcactggcataaagttggaatggatgcgaggtgccattctatcctctctactgcatctcctctctcttctggaggcaactgcctaggtcaggtcctttttaggtggactttcagatctagtccctatatgtgaaacctatatgtgtatataaatcccttgtttatgcaaattgagtacatgctatagacaccgtcctgttgcttatccatatgaagagattattccatacttttaatatttgtataatagcttgtgtctcataaattatttaactggtcttgatagtcatatagctattttccatttattttgctatcatcgtagcaatgaatacctgtgtatgtgtctattgaaagcagaagttgtcaaactttacatagtagcaatgaatgtatatgtgtgtgtgtgtgtctattgaaagcagaagttgtcaaactttacgtagtagcaatgaatgtgtgtgtgtgtgtgtgtgtgtgtgtgtgtgtctattgaaagcagaagttgtcaacctttttgtgtagaggaccatatggtttccattttaggctttgtgagtcatacggtctctcatagctgttcagctctgctattcaatcaggaaggctcctgtagacaatatacccgtgaatggtgtagtgagttctaatgaaactttatttacaagaggagactgaccaggtttggcctgggggccacagtgtgtagacccctggaaagatacatcctgagaagaaaaaaagaatatatgcaggaatgcttaactttgtgggttttctctcctcttgccctcactgactcaggatacacaaagacctatcaagctcacgcaaagcagaaattcagccgcttatggtccagcaagtctgtcactgagattcacctatactttgaggaggaagtcaagcaagaagaatgtgaccatttggaccgcctttttgctcccaaggaagctgggaaacagccacgtacagtgatcattcaaggaccacaaggaattggaaaaacgacactcctgatgaagctgatgatggcctggtcggacaacaagatctttcgggataggttcctgtacacgttctatttctgctgcagagaactgagggagttgccgccaacgagtttggctgacttgatttccagagagtggcctgaccccgctgctcctataacagagatcgtgtctcaaccggagagactcttgttcgtcatcgacagcttcgaagagctgcagggcggcttgaacgaacccgattcggatctgtgtggtgacttgatggagaaacggccggtgcaggtgcttctgagcagtttgctgaggaagaagatgctcccggaggcctccctgctcatcgctatcaaacccgtgtgcccgaaggagctccgggatcaggtgacgatctcagaaatctaccagccccggggattcaacgagagtgataggttagtgtatttctgctgtttcttcaaagacccgaaaagagccatggaagccttcaatcttgtaagagaaagtgaacagctgttttccatatgccaaatcccgctcctctgctggatcctgtgtaccagtctgaagcaagagatgcagaaaggaaaagacctggccctgacctgccagagcactacctctgtgtactcctctttcgtctttaacctgttcacacctgagggtgccgagggcccgactccgcaaacccagcaccagctgaaggccctgtgctccctggctgcagagggtatgtggacagacacatttgagttttgtgaagacgacctccggagaaatggggttgttgacgctgacatccctgcgctgctgggcaccaagatacttctgaagtacggggagcgtgagagctcctacgtgttcctccacgtgtgtatccaggagttctgtgccgccttgttctatttgctcaagagccaccttgatcatcctcacccagctgtgagatgtgtacaggaattgctagttgccaattttgaaaaagcaaggagagcacattggatttttttggggtgttttctaactggccttttaaataaaaaggaacaagaaaaactggatgcgttttttggcttccaactgtcccaagagataaagcagcaaattcaccagtgcctgaagagcttaggggagcgtggcaatcctcagggacaggtggattccttggcgatattttactgtctctttgaaatgcaggatcctgcctttgtgaagcaggcagtgaacctcctccaagaagctaactttcatattattgacaacgtggacttggtggtttctgcctactgcttaaaatactgctccagcttgaggaaactctgtttttccgttcaaaatgtctttaagaaagaggatgaacacagctctacgtgagtccatcctatgactttttctctcttctcagaatctgtctgtattcccaagtgggttttgctgagggagtgtttaatataggatcatggttagaaactcattttttctgccacaaaacctcagctcacatcctggcccaacattttaggagctcttagactttgtctgtgagccttgcccttttgtggctgcagtggccccattacagaagggggaataataattgtattgtgaggagtgaatatgaggacctgtgtgaagagtgtttcctactttctcaagtattagctgatcagtactataatcgatatttttccatagcaccacactccctgtgtcttgacctctcagctgcaagttacctttgaaaacttagtctaaaaaatcatacagcccgggtgtggtggctcatgcctgtaaccctaccactgtgggaggctgaggcaggtggatcacttaaggtcaggagttcgagactagcctgaccaacatggtgacacctcgtctccactaaaaatacaaaaattagccgggtgtgtagcgcacacctgtaatcccagctacttgggaggctgaggccggagaatcacttgagcccgggaggcagaggttgcagtgagctgagatcgcaccactgccctccaggctgggtgacagtgagactctcatctccaaaaaaaaaaaaaaaaaaaaaaaaaacaaaacacaaatcatacaaattttcttcttgttctttttttttttttttctgaaatggagttttgctttgtcacccaggctggagtgcagtggcgagatcttggctcactgcaagctccgcctcccaggttcacgccattctcctgcctcggcctcccgaatagctgggactagaggggcccgccaccac[183 bp omitted]caacactttgagaagctgagcaggaggatgcttgaagccagggggctaagaccagcctgggaaaaatagcaggaccccacttctacaaaattttttttttaattagccaggtgtggtggcatgtgcctgtagcacagctacttgagggaggctgaagcaggaggattgcttgcttgagcccagaagtaagagactgcggtgagccatgatcgtgccactgtataacccagcctgggcaatagagcaagaccccatctcaaaaaccaaaagaatcatatgaggtggatcctattatcctgttacaggtgaggaaactggggcaaagaagtcaagtgagctggatcctatccagtcaaggatcctgtatttaggacatggagagttttagggctgagcctaggctgaagatgtcgacttaatggctgggctgtgctgcctcatcttttactgtaaaccagcctgaccaacatggcgaaaccccgtctctactaaaaatacaaaaattagccaggcatggtggcacgcacctattatcccagctactcaggaggctgaggcaggagaatcgcttgaacctgggaggtagaggttgcagtgagccaagattgtgccattgcactccagcctgggcaacaagagtgaaactccatctcaaaaaataaacctattttggatgtgagacagggtttctcagccttggcactggtgatgttttgggggctggctctcctgttacagtggggggctctcctgtgcattgtaggatgttcagaaacatccctggtctgtactcactagatgccagaagcacccctcccttaagctctaacatccaaaaaggcctctagacatccccaaatgtcccctggggggaaacgtcaccccaggttgagaaccactaacataaggtgacttacctgaagggtcccgttccttctgactgagggaggctctgcctcagacatcttctgtttgagaagacagcgtagtgcgtatatgtgttacaagtggctcgtgttgaccgcctgcctgtggaaagctcgtcctttcttgaccacaggtcggattacagcctcatctgttggcatcacatctgctctgtgctcaccaccagcgggcacctcagagagctccaggtgcaggacagcaccctcagcgagtcgacctttgtgacctggtgtaaccagctgaggcatcccagctgtcgccttcagaagcttgggtgagttgagaatcgacttcgactcgagtatgtcacggagatgacctattcatctcacctctagctttcagtcgaggctaactgcacaagcaaagaattaacatccagagcagttgctcaacctcagcacttacagacatctcatgcagatcattcttcatcataggggttgttctgtgcgttgtagggtgttaagatgcatccctggtctctaccctctagatcctaatagcatccccttgtccagataaccaaaatagtgtccagacactgccagctgtcccttgtgggggcaaaatctctcaagttgagaactactgagctgtgtcattgggctgtgaaatcagagaatgagttcatgatggatgatgagagacaaacacaggtgtgcaggctgtgctcccattagatgaaactcatccaaaattttctttgtttttgcagaataaataacgtttccttttctggccagagtgttctgctctttgaggtgctcttttatcagccagacttgaaatacctgagcttcaccctcacgaaactctctcgtgatgacatcaggtccctctgtgatgccttgaactacccagcaggcaacgtcaaagagctagcgtaagtctccgtttattgagaccactgattgggtttcagagaagactatagcctaagtctccgtttattgagaccactgattaggtttcagagaaaactatagcataagtctccgtttattgagaccactgattgggtttcagagaagactatagcgtaagtctccgtttattgagaccactgattgggtttcagagaagactatagcgtaagtctccgtttattgagaccactgattgggtttcagagaagactatagcgtaagtctccgtttattgagaccactgattgggtttcagagaagactatagcgtaagtctccgttattgagaccactgattgggtttcagagaagactatagcgtaagtctctgtttattgagaccactgattgggtttcagagaagactatagcgtaagtctctgtttattgagaccactgattgggtttcagagaagactatagcgtaagtctctgtttattgagaccactgattgggtttcagagaagactatagcgtaagtctccgtttattgagaccactgattgggtttcagagaagactatagcgtaagtctctgtttattgagaccactgattgggtttcagagaagactatgtatttctttttgtgttgggggagggggctgcatatttgaagacatccactttttccttctatgatttgtatgcaaacttagtttcctgagaacttggatagggaagttaaagtttcccaattgatgtagccatttcggaaaactgtgtgtattcagccttcatggattctggcagattatgtaacccaataattccacctggaggtgcacattcgacagagggacctgtctcagtttgctgaaagacaggcactaaagcattcccagcaggtgttcataatctctgagaagtggaaataccactgacagtaagttggataagaaacctgtggttacatgctcctgttccatgagaaagaacactctcggtcgtatgcaaaaacctggacaaatctcagacattgttgatggcaatgagccagactcaagagtacatcctatggctttattcctgtgaagttcaaagatggacaaggctctggtgttggaggttcgggcagtgtattcacacgttctcgcgctgctataaagacatacctgagactgggaatttataaataaaagaggtgtaattggcttatggttctgaaggatgtacaggcttctgcttctggggaggcctcaggaaacttacaatggtggcagaaggcaaagggaaagcaggcacgtcttacatgggggagcaggaagaagagagaagagggaggcgctacacagttccaagcaaccaggtcgcgtgaggactctgtcacaggaacagctctaggggatggtggtaaatcactagaaaccacccccatgattccgtcaccccccaggcccctcctccaacactgggattacagttcgacgtgagggttgggtggggacacagccgaaccatatcagacagcggttacttttgttaagatagtgaaggagaggggtacaggagaatgatgaacctgctctgtttcttgacctggatactggtaactcaagtgccttaaattcatgacagtgcgttggctggcacttaaccattgtgtgtactttccagtatgtatgttttaattcaagcatttttatttttgcaattaaataagggtttcctgtaaatacttaccctctacttaccttcattggtacccacacattcaaatacttctctatactagtctttgttggccatttttctgagcttgcatcaaccgaacacaaaaagacccaaacccttttttaaaaaataacaactttattgtgatatccacataccacaaaacatatacttttaaagtatgtacttcatatattttaagaaatacttttaaagtataactatgctttaaaatgtacagtttagtgatcctcatatatattcatgaggaagtacaaccatcatgactgattttagaatgttctcattacctcagaaagaaaccccatacccattagcattcactcctcactcccttatctctctggtccctgggaattactaacatactttcagtcctattggattttcctatcccaggcgtctcatgtaagttgaatcacatgtggtcttttgcgaatggcttactttcacttagcaaaatgttttcaaggtttatccaaattgtaccatgtatcagtacttcattccttttcttggctaaatagtattccactgtgtagatattccccattttgttcttctagtcctctagtgatgaacacttgggttgttaccaccttttagctattctgaatagtgctctatgaacactcatgtgtgaacacctgctttcaatccttttggacttgtaaccaggagtagacttgctaggtcatatagtaaatccatatttaactgttagagaaaccaccaagttattttcctcagtgactgcacaattctgtattcctaccagcaatgtatgagagttctaatttctccacatctttgcttattttttacttatttacttatattttattattacttatatttacttattttttattatacccatcctagtagatgtgaaggagcatctcattgtggttttgatttgcttttcctgaatgactaatgatgagcatcttttcctgtgctttttgatcatttctatatcttctttggagaaatatatattcaagtccttcacacatttttaaaaacttttattttacattcaggggtacaggtttttaaacatttaaaaattttaacatttaaacaacattttaaaaaacttttattttacattcaggggtacaggtttattataaaagtaaatggcacgtcatggaagtttggtgtacaaattatttcgtcacccgttaataagcatagtacctgataggtagatttttcttccccaccttcttcccaccctctgctctcaagtaggccctggtgtctgttgtccttttcttcatgtctatatgtactcagtgtttagcgtccacttataagtgagaacatgtgatatttggatttatgttcctgtgttagtttgctaaggataatggcctccagctccatccatgttgctacaaaggacatcatcttactcttttttatggctgcatagtattccatggtgtatatgtatcacattttctttatctagcccactgttgatgggtatttaggtgaatagtgctgtgatgagcatacaagtgcaggtgtctttatagtacaatgatttatattcctttgggtatatacccaataatgggattgctgggtttgatggtagttgtgtttgaagttctttcagaaattgccaaactgctttccataatggctgaactaatttacattcctacaaaaatgtgtaagtgtacacttttctctgcaacctcaccagcatatattatttcttgactttttttaataatagccattctgacctgtgtgagatggtatctcattgcagttttgatatgcatttttctaatgattaatgagcatttcttcatatggttgttggcaacacctttgcacatttttaattggattttttgcctttttgtcaagttgtaagtgttctttatgttttctgattacaagttatatacgagacgtactttgtgaatattttttgccattctgtgagttgtcgtttcactttcttaatggtgtcctttgaagcacaaaagcttctaatctgatgagatgcactttatttttttcttttgtctcatgtgcttttggtgcaattgctacgaaaccattgcctaacccaaattcattaagattaacttctttgttttcttttctttttttttcccccaaatttgagatgagtctcactctgtcacccaggctggagtgcagtggtacaatctcagttcactaaaacctccgcctcctgggttcaagtgattcttctgcctcagcctcctgagtagctgggactacaggtgcccaccaccatgcccagctaatttttgtatttttagtagagatggggtttcaccatgctggtcaggatggccttgatctcttgacctcatgttccgccctccttggcctcccaaagtgctggaattacaggcttgagccaccacgcccggccgcaccaacctatatcttaaatctagaaagaacattaaaagcatgcatggcctcagagccctgctgcagaggcgtgaggagccatggactcggtgacttgccaattccacatttatttctggacaactcccataatggctttcatctttattctgttgtctctgagcttattttttgtggcaaccagaggtaaggagagtggttgaggtaatagaaaaccacacagttaaaccacacagttgtgaggcaacacaaatcaactcaagccaccaaaaaaggagtcctaggggactcgggttcaaggcttcttccatgttctttgaggagatattacttgagcagagacctgaatgataaagatgcatctaaccacaggccagaaaaagagcattccacttggcgggcacacatgcaaaatagcccaagttgagtaaaggagccactagacacgagtttggggaggatcaaacatgaataatatcttagagaatgaaacctgtgttgtcaagcaactgaaaaagaaccagggtggctgggacatggggacttgggaatgggtaggacccttgtggatcatgttgtatattttgggattttctccaagtgcagtgagataagttactgggggaggctaagccaagcatgcatataactgacactgtgcgtctcaggttggctgtctctgtaccccagagaccgtaagccaagcatgcatataactgagacggtgcatctcaggttggctgtctctgtaccccagagaccataagccaagcatgcatataactgagacggtgcatctcaggttggctgtctctgtaccccagagaccataagccaagcatgcatataactgagacagtgcatatcaggttggctgtctctgtaccccggaggccataagtcaagcatgcatataacagatggtgcgtctcaggttggctgtctctgtaccccagagaccgtaagccaagtgtgcatgtaactgagactgtgtctcaggttggctgtctctgtaccctagagactgtaagccaagcatgcatataactgagactgtgtgtctcaggttggctgtctctgtaccccagagaccgtaagccaagcatacgtataactgagatggtgcatctcaggttggctgtctctgtaccccagagaccgtaagccaagcatgcatataactgagactgtgcatctcaggttggctgtctctgtaccccagagactgggttgacagggatcaagaacagggttgggaggcagtgagcctctcaaggacagcaaatgtgggcttcccgactctgacaggattggcaagaggaatgagtccaggaactagaaaccaacagaatgtgacattttccctttcctgcaggctggtaaattgtcacctctcacccattgattgtgaagtccttgctggccttctaaccaacaacaagaagctgacgtatctgaatgtatcctgcaaccagttagacacaggcgtgccccttttgtgtgaagccctgtgcagcccagacacggtcctggtatacctgatgtgagtggatgttgggggtgcctactgtggagggccatggcggcagttcaaacctgggcctattgatgacagtctgctcattgatggaggccacatagcggaggtttaaaagctcacgcttaagaatcagaaaagacttgagttctagttcaggatttatcacgtatatactgtcttcttaagcaaaatatttaacttagaagcagaggaaaatcctgtcttagaggtcttatggctatcaagtgagactgtctatacagaacacgtactgtgtttcaaagctgttaggttgggttaatgcacctgcaacacacatggtacttcccgtgttgataacggttatttcgagcatgtagaatagacttggtgggtactcaggacagtagcggggaaaaatgtctatgggcctcttgaccccagttaatactataatacatgtgatgttcttgcagtaataggatgagaagaggctattcaagccagttttagggtacgtaaaacacagaaggaagacagatgagtaagtgttaaaggccaattgatttacctattaatggaattctaatacctttaggtgatacttatacaaaaggggagaggacaggagaatatatatgcatttgtgtctttttttttttttttgagttttgagttttgctcttgttgcccaggctagagtgcagtggcatgatcttggcttatcgcaacctctgcctcctgggttcaagcaattcccctgcctcagtctcccaagtagctgagattacaggcatgcgccaccatgcctggctaattttgtatttttagtagagatggggtttctccacgttggtcaggctggtctcgagtgtgtctattttttaaatacacaaatatcactggaagaaatagtattataatataggctgcctgtgagaaatagaactgagaagctgggagataggggaggatggagatttttccctctttatacttttgggcattttgaaatatgaacaacatgaaagtaagagtattctgaaaatgtcaagaaaatgagaggatttatacctcgagctaaaatagagggacagggacaggacttaacctcccacctaaaacaaccaaaaataaccaactaaataaaacaactgtttaagacttcagacatcaggcaatgaaggacagtggtgcctgagtgataagggacaaacaggtgagtcctagaattgtcccaggtaactatctggagagagatttcagg[133 bp omitted]tcgagggaagctgaggctggagaatcgcttgaacctgggaggcagaggttgcagtgagccgagatcgcaccaccacacttcagcctgggtgaaagagcaagactgtctcaaaaaaaaacaaaaaataaaccaaaaaaaaaacaaaaaacaacaaagtccacaaatgcctggatatgccagaaaattgagatccgtgagagaagcaagctgggtgaggcctccgtggaaatgcagatcttgtgtctgtcaacaggaagcagttgcccgttctgtcctagcctgttggatttccatgtgggaatgcggctcattattgccagatatcccagttttcaacagaggttgaaatctagattttacatacaattttactgatggttatatattgccaactgattttgttaaacataaaaatgccaggaaatctaaatatccgtaggccatatgtggttcgttcatcactagcttgcaccgtctgcttttttgtttttctctactccacacttttttttcaaagtcaacatggatccttaaaaaaaaaaaattcataaactggctgggattggaggctcacacctatattcccaacactttgggacgtcaaggcaggtgaattgtttgagcccaggagttcaagaccagcctgggcaccatgatgaaaccctttcttgacaaaaaaatacaaaaattagcttggtgtggtggcacgcacctgtagtctcagctactcagaagactgaggtgctgaggtgggaggatcccttgagccagggaggtagaggctgcagtgagctgtgatcatgccactgcactccagcctaggtgacagagccataccctgtctccaaaaaaaaaaaagttttgaacctactgtgattttaaagaataatgaaattgaaaaagttggggattctacacatgaggtaatcaatacactttaccagtccctgagggagcggtctcagaaggtccatgtcttgtccaaggacatcatcagatgaagaattagaaccaaaattaaagccctgttagagtattagctatgccatattacacgatactttttccttctgcattaccctcttattttctaattcttctatcatgcaactaagaagaaatgagagggccggacgcggtggctcacgccttgtaatcccagcactttgggaggccgaggtgggcagatcacctgaggtccggagttcgagactagcctggctaacatggtgaaaccccgtctctactaaaaatgcaaaaattagcgagatgtggttgtgggtgcctgtaatctcagctacttgggaggctaaggcaagagaatcacttgaacctgggaggtggaggttgcagtgagccaagatcgcgccgttgcattccagcccgggcgacgacagcaaaactccatctcaaaagaataaatgagaggaggtgttttcagataatccagaacttcatctcagctggggagtttgtaagattatagaaatattaccctgaatgtgaaattaagcaaatctccctgagacaccacgtccctcttcactctccttctcgtgtttttgtccccataggttggctttctgccacctcagcgagcagtgctgcgaatacatctctgaaatgcttctgcgtaacaagagcgtgcgctatctagacctcagtgccaatgtcctgaaggacgaaggactgaaaactctctgcgaggccttgaaacatccggactgctgcctggattcactgtggtaggctttttgctgtttctttgaagaccaagccgtcttttcaagggcatgcactgctgagaatggggcatctggaattgaggaaggctgtagtgtctgtgcctgggcatgtgaaggtttaaaaaatacttgcttcagattcttgtcgagacgttcatgtaaacaaatcagcaccctgacttctgtggcatggatttaatatgttgcaaagagttctccagtggcatataggtagaggactgagagagccggaattaggtcgggacctgaggggcaatttcatggcgaagatgatatttggtgtgtgttctacaaaatgaatgcacttcatcaggtgcaaaaataaagccaaaattccaggtagaagggtaaaacgtgaaggtgggagatccaaaaatacacgtgagaattaatgtgtgtaacagagaatgctttagaagaagacaaagggtagcatgagatgagccagaaaggagatggtgaaaagacttaatttcatgttatcaaatagagaaatatctgggtaacccctgtagcggcggtggcagtgtttttagaattaccagttaggataacatgttgttatgtattttccctgaaaaatacagaggcttctgaaatctggcagcgtgatttttacctaatccattaggaaatcagtttaggattttgtattcctcacttgaagagtatgttaaataacataacaaaaacaccagatgcattctttctctcccagtagtgcgttaggctatctgggccaatcgttggcactgaaagacaccaaaaacatcagatacaatattaagaaaaaatttaaaagcatctagaagctaaacagaaataatcttttttttttttttttggagacagaagagtctcgctctgtcagcccacgctgaagtacagtggcacaatctcggctcactgcaa[247 bp omitted]agtagatagcacttaaggctatccaaaactccttaagacgtattaaaaaaacacaacataaccttaaactagtactgaacagatgcctgaaagaaacaagagcaaattgtctcaggaggtaggtaataggatgacatgatccttgacctcagcttattcctaaaaggattttttaaggtcagtaaataccacacagttaaaataacccaacccacaaggaaataaagctcattgagccaaggacaagtcaaaatacaaacagctaccaaactatctaattatctataaagctattatacttactatgtttacagaaaaataacaagtttgaatcttagggaaaaggagatgaaatgagcaaataatacaactagaaattataaatataataactgactatatggggtgaatagtagattagacataattaaagaaaaaattagtaaaatggaagataggttacaattacctagaaagcagcatgaaaacagaaaaataggtaaatcatagaagagggtataagacttagatgattaagatgttctaacacacttactgggaatcgcggaaagagaaaatattttaagaagactgaaatttttctgtaaccaatgaaagattccaattcagattcaagcatccaaataagcgcttaacaggataaatagtggagaaactgcagaacaccagatataaagatgttggtctgtaaagatttaacaaggggctgggagcttggggcgggggaaagtgatatctacaagaaaggagacagacttgggtgaagagtaatagtggaaaccagagggcagtacagtgagatattcagtatggcggggagacgggagggtggattgtcaacctagaattctatagccaccaaaaactatcaagaatgaggataaaaacacattttcaaataaataccaagtttcttaccaccagatccttcctaaaagtaattctaaagactgttccttagacagaagtaaatcattccagatggaagagagatagagcaaagagaggggtagatctctggataaatctaaacaaaatgtggattgtgtataaaaataataccatcttgaagatttaatggaaaaaatatacaacagccataacaaaatataaaggggtaaattaaggtgaatactcaaattagcagaaaagaggagacagaatgattaaaaaattcccgatccaaaaaagaacaaggaaacaaaaattgaacaggtaagaaaatatgaaacaagatatatatttgaattcaaatatgctagtaattaaacgaacagattaaatgtttcagctaaaagattgccatattaaaacgtaactaatgtttataagttacttattaaaacgtgaggttgtggttgtacaacattgtgaactgtagtaagtgccactgaactgttcactttaatatagttaatcttaagtaaattttacctcaataaaatgatgaaaatgaaaggatagaaaaaaagaccacgcaaatattaaaaggaagcttacgcaactgtatgaatcagacaaaatagaatttaagacaaagtattattcggttcatgctaatttttaaattatcttcctactcagttgaactttaaatcttacaaggtgaacataattacttcccatatagagtccaggaatctaagagaaatcataatggaaattagaacatatgttgaaatgaaaaaggaatatactttgcaacaaactcagatggagctgtagtgcatgtatatattttaaaaggaatctaaagaataatgaacttaaggatttttttaatggtaaaataaaccccctaaaggatggaaggaaataaaaataaggacagaaactaatgaaacaaaaatcacaatggaaaagatcagaaacctgcagggtggttcttggaaaaaacagtttttgttaatgccatcctatagaatataatgcaagccacacatgtaatattaaattttcaagtagccatattaaaagtgatgtaatatttgaaagtaattttataagtaaatatttgaaactaattttaataatatagtttatttagccatatatcaaacatcacttcaatatgtaatcagtacaaaaaattactaatgagagattttacttttttgtattaactctctaaggttcactatgtattttatactatggcacatctagattcagacaagctacattccaagtgctcagtggtcacacgtggctggctatcacactgaagagtgcaggtctatgtcaagaatgggaaaagaaacattactacagatgctacagatattaaaaagattacatatgagcaactttacacaataaacttgaaaatttagatattttcaagactcaataagcttctaaaatgatagaacctaaatgtactcaagacaaaagaaaaatgaatcagtcaaatctttttatatagaaaattccaggcttagaagccttcattggtgattcttaccagacattcaaagaataaataattccactcttacatcagctttttcaggatcagaagaggagaaactccccaccattttttgtggctagcataatcttgatgccagaaaccaataagaattttattggttgtaatataatccttacaatttttgtaagaaagcagaattaaaggctagtgtcattcatgaaatgcaaaaacactgaacagaatattagcaagcagaatccataaatgtattaaaagaataaacataatgactaagttgggcttatccccaaaatgtaaagttgctttaacattaaaaagattagtaaaaaaatcaatgtaaatcactttactggttaaaaataaaaatcatgatctaaaatgcagaaaagtttgaattaagacatacaattcttgaaaaactatttgggaacttccttgatgatctaaagaatatgttcaaaaaaatctaaagcaaacatttgtctaatgatgagagaaaagctttctcttcaatatcatgaaaaagataagaacggtggctataatcacttctagtcaacagtgtcctgaaaatcttagcaaatgcttcaaggtaagaaaaacactaaacctgtaatctttgaagaaacacctaattctatacagatgatttgaatgtacatagaaaaatccaagaaaatctgtagctaagttatcagaattagtctaacaagcttgcttgaaacaatatatcaaaaacagttactgatataccaacaagaagtaataagctagtggaattaaataaaagtaccttttacagtaacataaaaaagaaattacctagaaatagctactgtgatatatgtgagacttttatagagaatatgatcaaattatggtataaaacaatgttatattcaaagattgaaatattcagtatctaaaaagtcagttttctgtaagttgaattcatttgctttcatgaaatcccagtgaaaatgcgatgtttttgtttggtgattgagttgaacttgaaaagtaaattttaaaatgtgtatggaacttgcaagaggccaagaatacctaagaaacacctaaaatataaaaagtgggccaggcgcggtggctcacgcctgtaatctcagcactttgggaggctcaggtgggtggatcacctgaggtcaggagttcaagaccagcttgaccaacatagtgaaaccccgtctctactgaaaaaaaaaaaaatacagaattagctgggtatgatggtggatgcctgtaataccagctactcaggaggctgaggcaggagaatcacctgaacccgtgaggcagaggttgcagtgagctgagattgtgccgttgcattccagcctggacaacaggagtgaaactccgtctcaaataaaaataatgtaggaactcttgctctaaatgtgtcatctaaagttttagaaattaaaaaagcatgagattcacacagggataagcagacagaccagagacacagaatagagatctcagaaacagactgatccacgtgtgttcagatgtcgcatcatggaatagcgtatcactggtgcagagagaggatagacctccaacaaacgatgctgagacaattcagttgtccctccatatccataggaggttggctacagatttcccctgaggagtccaaaatctgtagatgctcaagttcctaatgtaaaatggcatagtgtgtgttttgagacagtctctcactttgtcgcccaggctggagtgcagtggtgcgatctcagctcactgcaatctctgcttcccgagttcaagtgattcttgtgcctcaacctcctgggtagctgggactacaggcacgcatcgccatgcccggctaattttttgtattttttgtgttttttttagtagagatgagggtttcaccattttggccaggctggtctggaacttctgacctcaggtgatccacccacctcagcctcccgaactgctgggattacacgcatgagccaccgcatctggcctatatagtgtttgcatataatgtacaggcatcttcccataatactgtaaatcatctctaagttactgtgatatgtaatacaatgtaaatgttgtgtgaacagttgttatactctattggttttttcgtttgtattttttagtgttgcgtgttatgtgttattgttttaattcttcaataatttcaatctgccactagttgaatctgtggatatggaggactgacggtgcctatccacatgaatgacaaaggctgtcgtgctttggtgtctcttttcctgatattagactgaggtgtaatagcctttaagcatggtacccttactcctttgcagtttggtaaaatgttttatcactgctgctggctgtgaagacctcgcctctgctctcatcagcaatcaaaacctgaagattctgcaaattgggtgcaatgaaatcggagatgtgggtgtgcagctgttgtgtcgggctctgacgcatacggattgccgcttagagattcttgggtgggtatcgccaagctcctggttatgttttcatgagtggcaaagacggaaaatggatgggaagaaagagaaagatgaaaactccaacaggaccacatagcagctagctgtggttgcatcatgaaccagtgtaaaacttcagggcttaaggcaatgagaagttagattgctgctggctctgcttgtctgggcaggcgtcactgacctcagccaggtgtgcttaggaagctgtggttaactgagggattggctggtttgggttgaccttgctatatggtatggaggttggctggctgggttggctgtccccttggggatgacaggtgtaactgggccacgtctcattatctaactggttggcctgggctcattgacatggcatctgtatcagtttgccagggtttaaaaagtagcatggactgggtggcttaggtaatgaatttatcacttcacggttatggaggctgaaagtctgagatcaaagtgtcagcagagttggctccttctgaaggccatgagggagaatctgcttcaggcccttcttgtcttgtcgataaccatctgtcttctccctgtgtcttcatgttctcttccctctgtgtgtgtgtgtctaaatttcctcttataagaacaccagtcatatgattagaatccccccagtgtcctcattttagcttaattgcctctataaagaccttgtatccaaatatgatcacattttggggtactggggtttaggacttcaacgtataaattttggcagggacagaaatgagcccatagcagcatctcaggagttcaagagatgaagtatagaaaacatccaagatcaccaggtgtgatagcttagtcctgcagtcccagcactaaaggagcctgaggcaagccaatagcttgaggctaggagttcaagaacaggctgggcaacatggtaaaaccccatctccataaaaattagccaggcgtggtgcatgcctgtagccccagttactcaggaggctgaggaaggaaaattgctagaacccaggaggtcaaggctgcaatgagccatgatcatgccactgcacttcagccgggatgacagaaaccccatctccacaaaaattagcccgcaggcgtggtgcatgcctgtagtcccagctactcaggaggctgaggcaggaaaattgctagaacccagcaggtcaaggctgcagtgagccatggtcatgctgctgcacttcagccaggatgacagagaccccatctccaaagaagaaaaacacccaaaatggtggctcagaactctcctaatcttgcttccattgttatctgagacggcttcatacctttttttggataatatgttatattatccaaagcaaggtatgaagccggaaatagactctgttagtggaatgagctgcaaagtcacattgctgtgggcagggatacagagaagaatggacacttatggctacttttaccacctacccacagacgcgtgatctgaggtcgtaaacactggactgtgagagattgcacttgaggcaatggggtgtgcctcaactagacgtctagctcacatcccatcctacctccaccctgaggctggggccgcatcttaccatgtgtctttttattgcaggttggaagaatgtgggttaacgagcacctgctgtaaggatctcgcgtctgttctcacctgcagtaagaccctgcagcagctcaacctgaccttgaacaccttggaccacacaggggtggttgtactctgtgaggccctgagacacccagagtgtgccctgcaggtgctcgggtgagctggggtctgttgtgctctatgggcagagtgctccgggctaagaagggattggctgggacctgcagtgtaatcacgttgcatttaaaatgcaaatgatgttccttgtctcagggttgttgcaggagtaagaaccaagcaggtgagtataaaactcttaccacagtaagtggtgaacagtgaatgtccaacaaatggaaacacttgtgaagtggcctcattgtctggggtaacacccgaggttcattgtcccagggccgtggagatccaaggacgcagagatccaaggacgcagatacacaaagagtgaggttaagagcagaagtttaataggcaaaagaaagaagagctgtctgctacagagaggggtctcggaaaaatggattgcccgatccatggtgaaatgcagagggttttatagacgagctggtgggaggtgtggtgtctgatctacatagggcatgaaaaactggttaggaccaggtgtgccgtttgcatagggtgtgaatttctggcagcccccaccccagtcttttattaagcaggcaggttctctgcctgagctgcactatgttgcccatttctttcttactgtacccatgctaataaaaaagggaagatggtgcttccatggtgaacaggcctggcccccaggtagctcttttcactggcgcagctgctggcattccccccatgcaatcttcgcgctcccttatttatgtttgcagctcagtttttcaggatgctctttgttagaaaagaaatgatttcttgggctggtttttgttagaagggaagctctgctgaggacttttgccctcactatctgcctaaataattttttacctcctatatcacttattattataatacaaattatgatacatgtttatattttaaatatttatgtgtaaatacaagttatatgtatattcataagtataacatttataaatagaaacttatataaacataatttatattttaatttgttatatttataattacatataatcccacaaacattattttactagataactatagagtccttaacatttttctcattcattttcccctactgttttcaaaccaatatgagatgaaggtaatcataggcagttattaggctgttcatttccagaaaagggaaatataatgggttaaaactgttataactctaacgctaaagaacattcactgatttttttttttccattttgtgaagatacaggtttgttttcttgaagtccatccttataaatctccacctggaaaggctgagtgcttggcattgtttctttctcattttaatgtttgctaaagattcagaatgtagactaccaaagtagacacgtgattaaggggaaggactcaaattgtctgcattctgagtcacggaggtctgtgtttgtctcctagccttgccatgtttggccctgtaagccagggtaaggcatttgtcctctttgattatcagcctcctatctacaaaatagggatgattatttggcatggtaattatgaaagtatgcatcagataatgtgataactatggcagaactaaataagtgagttttcatcttcctccagcccctaccatagatagtctcacaaagatgtgtattaagatacatagttgtgctaaagaacatagcttaccccaacagtgtgggacagttgcacgcaaacagatgccaaatggagatgagagatattatacgtaaaaggaaggaccaagacacggtgatacttaatccttctgattcaaagcaatgatacaacgtatgggggctccagaaacaaattgcttgaatttgtatccagactaccactttctggttttgtgaccttaacattgttctcattgtcttcatcacaagtcgggacaattatgctacctcataaggcagttgtgaacatttaatgagataggcatgtaaaaagccttagcagagggccagggcccaggtactcggataatggaaactattaactttatctttgaaaaagtaaaaatagcttcagtctttctccctaactcccactgacttcttgttgcaaatccaaatgtttgtgtggagttcatgccttctattaccaattctggacatttatttatgtccagtgacatattggagccagctcctacaagctggtgagagccacgtgtgtgtgtgtgtgtgtgtgtgtgtgtgtacctgtctttgtaactctgtttagtgacagcaagtgggcagctcaaaattggccatgattgccttggagaatttacaccacagaaattggcaaagctataaattgggactttatttattttctggggatccaggggtaacatttatcagcataccgctgcatttgatgtgtatgtctttcctcttggaggtaacaccagggtttcctaggcttgtcctgggatgaattagggagaaagatgagctgcagaaaagggaaaaagtatgtgaattaaaaatagaacctcttaaaatattttaccaggctgagaaaaactgattttgatgaggaaacccaggcacttctgacggctgaggaagagagaaatcctaacctgaccatcacagacgactgtgacacaatcacaagggtagagatctgattgcgaggaacctgggctctgactcgaacacctgcaaaggacagggactgggaccgttacttacatgacactgcacccaggagatacaaatcattgatactctgagttgtgagatttctggcaccccattcatagatttgatatgatacacgtggtttttatgtgctctgtggccttggatgagtcactgaaaggccttcatggtctctcggtctcacaaggacctcttaacccctcaataaagtgttacatttctaaacattggaaattctttttttgcctttttttatttgtataaatttaaggggtacgagtatggttttgttacatgtatatattgtgtgggaaaatctgggcttttagtatacctatcacacagatagtgtacattgtacccattaggtcagttctcaccctgcacctccctctcaccctcctgagcctccaatgtctactattccacactttttttttttttttgagatagattttcgctcttgttgcccaggctggagtgcaatggtgcaatcgcggctcaccacaacctccgcctcctgggttcaagcgatttctcctgcctcagcctcctgagtagctgggattacaggcatgcaccaccacgcctggctaattttgtatttttttttttttttttttaagtagagatggggtttctccatgttggtcaggctggtcttgaactcccgacctcaggtgatccacctgcctcagcctttcacagtggtgggattacaggcgtgagccactgcatccagccactctttatatattatttagctctcacatacaagtaagaacatgcattatttgacttagtttctgagttatctcacttaagatcatggcttgagttccatccatgttgctgcaaaagacatgattttattctttttatggctgaataggattccactgtctataaatcatgttttcttgatccactcatctgctggtggacacttatgttgatcccatgactttgctattgtggagagtgctccagtaaacacatggatgcaggtatctttttagtatgatttctcttgctttggatagaactcggtagtgaggttgccggacaaaatggtagctctatgtttagttctttgggaaatctccatactgcctggaaaatcttgaaacagtgtttgctactgatgaatgactggaataggagtgcaggttgaagaaactgtggccccctccccgtgttgacttggaaagacgctggccacactgaaagcactagaaaggctggtctgacttgggcacccttctttctgccagtcctactaggattccaggttgggctcctgatctgttcttgcctgatgaaagcaccttttttattggtacataatagtggtatatattttggggttcatgtgaatgtttgggtaatttccatggcattgctaatattacctctcctcacggtctttgcctctcatattcttccccaaactcccctctggctctcctttcctcattgggcctcttgagttctgaggctaccctgtctcccctacctttgaataaagatctcttgggagtgggagctgaaaggaaattttaggaatgggggtatttcacttctgaatttttttttttttttttttggagacagatcctcgctctgtcacccaggctagattgcagtggtgcgatctttgcccactgcaccctccacctcccgggttcaagcaattctcctgcctcagcctcccgagtagctgggattacaggcgcgtgccaccacacatggctaattttactatttttagtagagacggggtttcaccatgttggtcaggctggtctagaactcctgacctcatgatctgtcctccttggcctcccaaagtgctgcaattacaggcgtgagccaccgtgcccggcctcacttctgaacttctgtgccactgatttaggagtgaagattgagaaaatcagcaacctgaatgtccatcaatgggtgaatggataaacaaaatgtggcatataaataaaatgaaatactgagtcttcaaaaggaaggacatgctgatatatgacacaacatagatgaaccttgaggatattatgctaaatgaaataagccagtcacaaaagagcaaataccgtacattctccttctatgaggtacttacagtagccaaattcatagaggcaaaaagtaaaatgttggctaccagaggccaggggaaggaggagaagatggagttatttaatgagcatagagtttgttttgcaagatggaaaagttctggagatggatggtggtgatggttgtaaaatgtgagtgtgctcaaggccacagggatgtacactttaaatgggttaaaatggtaaaattttgttacgcatgttttaccacaataaaaagaaagtggggaggctgggtgcagtggctcatgcctgtattcccagcactttgggaggccgaggcaggtggatcacctgaggtcaggagtttgagaccagcctgaccaacgtggaaaaatcctgtctttattaaaaatacaaaaaattagccgggcgtggtggtggtgcatgcctggaatcccagctactcgggaggctgaggcaggagaatcgcttgaacccaggaggcagaggttgcagcaggcagagatcataccattgcactccagcctgggcaacaggagtgaaactccatctcaaaaaaagtgtggaaagaaaaataacaaacaggaaaatctgggaagtcatttagtctgtcatctgtaaagtggtaatgattaaggactatctattgcacctgggtgcaatagacgtgataaaatataaaagcagcttgaggaaccaaagaacctattctccagctaccttaattatgttcatgagatgtccatttccacccccagcaggaacattaacatttttctcctaacggttttccctccactaaaaatacaggtcagtagaaaagagggagaaggaagtgctgatagagaacgggtactgagctgcccagcacagtggtttacgcctgtaatcccagcacctcgggaggccaagtcaggaggatcgcttgagcccaggagttagagaccagcttgggcaacatagagagaccctacctctactatctatctatctatctatctatctatctatctatctatctatctatctatctatatctatctagaattattattattattattttttaattatctgggcgtggcgactcatgcctgtggtcccagctactcaggaggctggggaaggaagaccacttgatcctgggaggttgaggccgcagtgagccgcgatcacaccactacactctagtctgggtgacacagcaaggcactgtctgaaaaactttttttttttaatcacaaaaaaagaggtactaagctataaaaagtctaagttacaagtaaagaatcttaatgacagaattgaaggagattattcacccaagagctattaatacattgacaggtgcttaccacaagctgaatattttatatgttatttcaattcttgcaaaatctgaggttgatgctataagacccttcttgtaatgggaaaattggcctaaagggtacaagtaactgcttccaagctaagaagctgtcactctggctgccttcaccctgggaatccttttccacccaagttcattattcctggaattccatctgtctcttcttcagtccaaggatctcctgggctgtttcagcactctaccacctctgtctctcataacctgagctgtgcaccaagcttgactcacctcagccacacattagtcctgggcacatctagccaagcttttaagattgcatggttggccgggtgcagtggctcacgcctgtaatcccagcattttgggaggc[134 bp omitted]gaggcaggagaatcactggaacccaggaggtggaggttgcagtgagctgagattgcaccattgtgctccagcctgggcaacagagcgagactgtcttaaaaaaaaattgcaaggtggtgggtgaggaagtgagtgtcaaaaaagacagcaagcagggtgggtaaaaggagagggaggaaaggtaaatgaagctggagacacaaataatccgtctaccttcctcataagtataggcttgaagttagacaattggtcacaagctaattggtctgtcttggttcacgggcttcataatttggaggcagcctagaaaaaagttcagcagtcaaggtacactggaatcccttctatctcatctcttctcttttcctgaatcaccaattaccccttccaaaccccctccaagacctattatgggcccccccagtcctacaaagtaacattggcctgactgtacagtggatttgaaatcatctgtctactctaaaaaaatgttgctttaagatactttgatgtaattgaattctaggacaaacttagaaattgtagaataacaacaaaaaaaattcctaaattagtaattgagtagactaaatatgattgacttgagtattgattagtaaattgaaaatttagtaattgagaatttgtggatcaagcattaaacagaggatatccctgtgtttttgtctgttttttgagatgaagtctcgctctgtcaccagtctggagtacagtggcgcgatctcagctcactgcagcctctgcctcctgggttcaagcaattctcctgcctcagcctcctgagtagctgggactacaggtgcctgccaccatgcccagctaatttttatatttttagtagagacagggtttcaccatgttggccaggatggtctcaatctcttgaccttgtgatctgcccacctcggcctcctgaagtgctgggattacaggtgtgagccaccatgccaggccatccctggttttttgtttgttgttgttgttttttttctctgagacagagtctcgctctgtcaccaggctggaatgcagtggcatgatctctgctcactgcaacctccacctcccgggttcaagcaattcctctgactcagccttctgagtaagtgggactacaggtgcgcaccaccacacctggctaattttttttttgtattttagtagagacggggtttcaccatgttggccaggatggtctcaatctcctgacctcgtgatctgcctacctcggcctcccagagtgctgggattacaggtgtgagccaccgtgcccagcccatctctgttatttttaaagaaacaatggagaaatcttgggatagtctttatttatcttgtcagattatcagaaataacatggttggccaggtttggtggctcacgcctgtaatcccagcactctgggaggccaaggctggaggatcggttgagctcagaagtttgagaccagcctgggcaacatggcaaaacctcatctctactaaaaaaagttacatggtggcacacacctgtagtcccagctactcgggaggctgaagtggcaggatcccttgagcctgggaggcagaggttgcagtgagccgagatggtgccactgcactccagcctgggtgacagagtgagaccctgtctcaaaataaaatatggcccattttaatagctggtaactgaatatgaatcaatgagatgaagattaaggcaattaacctttgattttatttttaacctttattgccctgacaatattttctaaattagttcacatacgtctcccactctttctatcccagatttcatctacaaagggcagtaaagatatagaaaaaggaagagaatgaagtatttatttcaaggactctgggttttactatgtctaatagtgagaacatggatggatagaaggattatagccttcaacttattgaaagatcccatcaggtgttgtaaagtgggtcagatcttaaaatagaaaagttggatttataggccagtttgacttactatctctgtaatctgttgtaaagcattttcttttggtatctttgcttttaaatcagtaaagtaaggctatcctatcttacagggctttgatggggatttagaccctctaggaaggtgttttataagctatgaaatgctaaatggatctccagctattctgtaagactgcttctgatagcgtctgcttattgaataataaaatagtacaagaaagactcttggtgttagagcgggggagagaaaattacaacttaataagatcttattcttcatagagatttccatccatgacacatcgatttcacatatcctgtgcgggatacagttttatattttcaggtgagtaaagtacattttagaagtgttacacagccacagagctaacaaaggcagaagtgaaagccaaaattgggtctaatttaattacaaattatttctgtcctcatcattttgaagatgaggtaattaggtccagagaggggaagtgactgacccaaaagtaacaaaataaggaattatcctggggtgtaaagacagagtctgtggccggaggcagaccatatttctgtgcaaatggataggacagagtggtggtgagttcatggaggaaggacggaagaccacatcatt[138 bp omitted]ggtgaagccccatctctactaaaaataatacaaaaatcagctgggcatagtggtgtgtgcctgtaatcccagctactcgggaggctgaggaaggagaatcacttgaacccgggaggtggaggttgcagtgagccaagattgcaccactgcactccagcctggcaacagagcgagactctgtctcaaaaaagaaaacaacaaaactatttcagatggataaaataagcgaaagggaggtggtccttacgatggttttgtattaacctgaatattattcctgtaaacagggtcccattctacctccatgtcctgcacatctgcagaatagagaaggaagacttttactttctggagaaaatttatttcaagtctccttgagcagcaatcttaagtctcaacccatagcatccaatcctttgtgtattagagggtttacctctcttgtcctgcagctaactcaggttgacactttctatgcctcagagcctttatttttgtcttatcagggtacaggtgctggtagatgtggcagtgggtacttgtggaagatctggattcttatttcttcaagaaatatgtaaaatcaactgagcatgaaaatggagaactgttgaggacaatggaagttgagtagaacgggttaaagcagtatgttacagtatcatgtgcaacagtaccataagcaacggtaagaaaactcttaggattagccataaatttaagcagggttgaacatccttcagcatgttcagctatctggatacaagtgtggaatacgtagaacattggaaaaaggcttgtggttttaagtgcataggacaaagtgagaggggcaggcagagcatggaagatgtttagacaaatttgaggggctgtttggagtaccgtcagctaaatagataaactctaagcagggtgaagtatagcaaaaaggcagctgtcttcaggaactgagaagggtttggggtgttattctacttatgagccaaaaagcctgttcctgtttcatggaagctagcagaagatatgagactcctggcccagaaacaaataattttatcatccatgacaaaagcatgagtcagtatttcttgttgcttttaatcagttcctcatacttcccaagtctcacagctttgggtgccataaagggtccatgatagatgactgtacctgctgtagactggattaagagaagcatgctgagcttagggaatctgccgattttcaataagcagaacaagcctgctttttgtctggggtagaaagttaccttatccctcaagtttgctcagtgcaaacacaacctggcaaaagtccttggcaaaaaaacaaaaattaaaaaaaagaaatttaaaagtcagggtccaacattttatgcatacccataaagaatgtacaggggtgcttagggcccatgataaacagcctcttgctatagtatatcagtgagaatggaatctacagattaatctctggttagagtcagtcaggaagatatgaagtggttgttgaagaggcaaatgccaattaaaagtgaaactactaggccaggcatggtggctcacgcctgtaaacccagcagtttgggaagccgaggcgggtagatcacaaggtcaagagatcgagaccattttggccaacagggtgaaaccccatctctactaaaaatacaaaaagtagccgggtgtggtggcgcatgcctgtagtcccagctactcgggaggctgaggcaggagaattgcttgaactcaggaggcggaggttgcagtgagccgagatcgcaccactgcactccagcctgagcgacagagcgagagtgtcttaaaaaaaaaaaaaaaaaaaaaaaaaaactacaaaatagttggaatttctggagtttgagcatgaaggaggcttagatacggcagaagatactgtcgttgaagatgcagtcacacagggatgtccgatcttttggtttccctgggccacgttggaagaattgtcttgggccacacactaatgctggctgatgagctaaaaaaaaaaaaaaaaacaaaaacaaaacaaacaaaaaaaaagtctatgcatacgaaagtttatgaatttgtgttgggacctcattaaaagtgggcccaggctgtgggttggacaagcatggagattaaaattaggtgtaaggaatataggctgaacatcccaaatccaaaaatccagaatctagaatgttccttttgaacgctgagacgatgctcataggaaatgtttactggaacgtttccgaattcagaattttagattttgtgtgtccagccagtaagtataatgcaaatattccaaagtctgaaaaaaatgcaaagtccatgcatttcggataagggatactcaacttgtaccaccggaggggctgacggggggccaggagctaaagtcttttaactgaagtctaatttggcagtccggaagtggctcgaagaacaaggggtctaaatctaaagacacgaggatagaggctgagagggagacagaggggtgaagagaatggtcgcagagcagaaggtgaggaagagaccacccacccgattaactgctaggctcccgagacaagacaaccacgcccgaaagagctgcaagagaagcaatgtcctcagaggagatgcaggtttcagagagagggagattaaagggaccgtttcaacctattctctaaatataggtttgctggtttccaaagagcacagtgagaaggtttcgggtgaagaagggcaggagatggaataaactcagaaaagtacatcgtaatgaagagtgggagataggaatcaatccaggccaggtgcggtggctcacacctgtaatcccaacacttcgggaggccgaggcaggtggatcacttgaggccaggagttcaaaaccggcctggaaaacatggtgaaaccccatgtctactaaaaatacaaaagttagccaggcctggtggtacatgcctgtaatcccagctacttgggaggctgaggcagaagaaccacttgaactcgagaggtggaggttgcagtgagctgagatggtgccactacgctccagcctgggtgacagagtgagaccctgtctcaaaaaaaaaaaaaatcaatgcagagtctaatatttcttgggggagtcaatataagtgaagataaaggcatattaggagttctggatgtctatgtggtttaatcacagtataataattatggaattataaacacatcgatcccacttctcaatccatgagaaatgaggctttggactttcctgaggtatttttatatgctttgctttattgaattctctcaacacctccaagaattaaaaacattacaccaaggaggacatagacaagactgaaggcacagccaacttatgatcttggtaccagacacagtattacactaggattccagacctgggcgtgcaatgggcggcctccaacaaccgtgacaaagcctcctgcagggaacagctcatttgtccccacaaatggtgacattggagcgacacacaggccaggatgtcctggtggctttcccccaagatccatggtcaagccacgtggcatctaatccgtgggatcaccaccaccacttgtcttcaaggtcattaaaatcccacgcacacttgagtttcagacagagctccttctgtgaggtctgtatctcctctctcactacattgtgcaggtctttttgaagcctgcaaaataagaagtactgaagtttagaagcagtgaagaagtttagaagtaatttttaatttttaaggttcaggggaacacgtacaggtttgttacatgggtctactgtgtggcatgaagtttggtgtgtgaatgatcccatcacccaggtagtgagtatagcacctgaaagtactttaacccttgcctccttcctactctcctcctcctagtagtcccgtgtcttgtcaacaaatatatgtgtatatatgtatatacacacacatacacacacacatattcatatacatacacacatacacatatacgtattgtttgagacgcagtgtcactttgtcacccaggctggagtgcagtggcgtgatctcggctcactgcaccctccacctcctgggccccagcgattctcctgccttaggctcctgaatagctgggattataggcgcacaccaccacgccggctaatttttgtatttttagtagagatggggtttcaccatgttggccaggctggtctcgaactcctgacctcaggtgatctgcccacctcggcctcccaaagtgctggaattagaggcatgagccaccatgcctggcctactgtcaccatctttaaatccacatgtactgattgtttagctccaacttgtgagaacatgtggtatgtggttttctgttcctgcattagttcacttaggctaatagccctcagctgcgtccatgttgccacaaaggacatggtttcattcctttttagagcagtgtagtactccatggtgtatgtggaccacatgcatgtgtgtgttcctcacagcactgttcacaatagcattgacatggaaccaacctaggtgctcatcaacagcagactggatggaagcagtgaagtacaggcagggtgcagtgtaaagtggcaaactgatataaagcataataaaggtttagacaaaagtaattgccatttttgccattaaaagtaatggcggccaggcatggtggctcacacctgtaatcccagcactttgggaggctgaggcaggtgaattacctgaggtcggcagttctagaccagcctgaccaacatggagaaaccccatctctactaaaaataccaagttagctgggtgtggtggcacgtgcctgtaatccaggctactcgggaggctgaggcaagagaatcgcttgaacctgggaggcggagggtgcggtgagccgagatcacgccattgcactcctgtgtgggcaacaagagtgaaactccatctcaaaaaaaaagtaatggcaaaaaccattactttaaaaccactgcattaaaagtaatagcaaacacaattactttggcacctacctacagaaagactaacaaatgaagggtaacttttgtttacccttcgactgggacctcccaccaccctagccttacccacagatgtcagggagaagatttgatggcacgggaacccctttccatagagaaaaggcacaaccacaaaggtagaggatgagaaaaccatggcgcagatgacacaagggaccttgtgggcaggccagagtaactcaggccattttcactgtgtatgaataaatccaagtacttctcattaatctgcatctagcaatttttgaaaaataaaatctgagcgttctacaagaggaggcgagggtctgggcacccagtcagaagccccttctgcacacatgcatgatagacagcagagaagcttcatctttaacggttgctgtcccagaaccctttttaaaatgcaccactgaagtgtgaagttggcaacatcaaatctttaaaaggtgcagatcgtgactcacttcctaaagtaggcaaggttccttggcatctgggatgacttctgctgagatgtaccagtaacagctgttaactgcttacctttctccatgccccaactttttttttttttttttttttgagacagggtcttgctctgttacccaggctggagtgcatgatcatggctcactacagcctcaaactcctgggttcaggcagtcttcccacctcagcctcccaagttgctgggaacacaggtgtgtgccaccatgccaagccaattttttaaaatttttgtagagacaggatctgcctatgttgcccatgctggtcttgaactcctggcctcaagtgatcctcctgccttggcctctcaaagtgctggaattataggcatgagcaactgcagccaacctgcttacctttctgatttcctctcagaatactgaatggggtggaaagtgttctaattaaatgctcttctctcagtgcctcaaaggggcaacataaagcttggtgcaacctcagggcctttgcacatgctactgaaacatcctcagtacattccacccttcatctctagtcacctctcatgttcccttcctgatatagggactcctccttccagcctccttgggactcaggatcaatggtaccgcctctggcaagccccttgctattctggtcaccctcctgtcttatctcaacccagagtttctttcacagcattcatgacaacagagattgcttttatgtctcagacctgttatctcctggaggagaactcaagactctcaaggacaaggctcatgtccgtttgtttcccccctgtctaccatgccatggtgcttggcccagagtcggtattgaaaaagaagccacaagttaatggctatggagtgacacgtacagtaggtacaagaatgataaacagaagcaggctctcaaaatacccaaaagtctccaggactgcaccatccagtacggtagtcattagcgacatgtggctgttaagatttaattagtaggttgatgcaaaagtaattgccatttttgccactaaaagtgacagcaaaaaccattactttaaaaccactgcattaaaagtaatagcaaacaccaaaattactttgtaccaacctaataaaattaaaaatttatatttatattaaaataggctggtggccaggagcagtggctcacgcctgtaatcgcagcactttgggaggcgggccaacatggtgaaacccccgtgtctactaaaagtatgttaaaaaaaaaaaaaagaaagaaaagaaaaagaaaattagccaggcgtagtggcatgcacctgtagtcccagctactgggaaggctgagccaagagaatcacttgaaccaggatggggaggttgtagtgaactgagattgcgccactgcactccagcctgggtgacagagcaagactccatctcaaaaaagaaaagaaaaaacagtccgggcatggtggctcatgcctgtaatcccagcactttgagacgccgaggtgggtggatcacctgaggtcaggagttcaagaccagcctggccactacggtgaaacccccatctctacaaaaatacaaaaattagctgggcgtggtggtgggtgcctgtagctccagctactcgggaggctgaggcaggaaaattgcttaaacccgggaggtggaggttgcagtgaatcaagatgacacaactgcactctagcctgggtgacagagcgagacactgtctcaaaaaaggtgaaagaaaaaagaaaactactaattcagttcccagtcacactaaccatgtttcaagtgcccaatgatgagatgccgctcgtggctacacagcaggtgcacagcacagagatcactcccacccttactggaagttccgttggcctgcatggcctgaggaagccgagtgcaatggaaacctgacacatgctctagaagcctagtcaatctagccttgtccctgtatgttctcccctgcagaaaagtcagtgaggtttacccgagtttctgcagcctgcatgtcgactttttcaaagccttacatagcatcttgacaccatcagtatccaattcattgcctagaaggttcagattgaccaggctcttactgctgctgagaacagagaagagatgctggcagcaagcagttgtcagattgcatttcgccaacctaggggcgggtgggaagaaagcacaacagatagtcctctgagactgggaagttagaaaagagataccacatctgcaggaaaaa[141 bp omitted]aaaccccatttctattaaaatacaaaaattagccaggcatgttggcatgcatctgtagttccaggtactcaggaggctgaggcaggagaatcgcttgaacccgggaggtggaggttgcagtgagccgagatcacaccactgcactccagcctggcgacagcaagattctgtctcaaaaaaaaaaaaaaaaagggctgggcgcggtggctcacacctgtaatcccagcacttagggaggctgaggtgggtggatcacaaggtcaggagttcaacaccagcctcgacaagatggtgaaaccctgtctctactacaaaaaatacaaaaattagccaggcgtggtggtgggtgtctgtaatcccagctgcttgggaggctgag[132 bp omitted]tggagtacttactgcatgccgggcaccttttaaatactgacatataactcatctaacccatctatcaatcttatcaaaggtacatactattttaaactgtatttgatggaggaggaaacaaaaacttaacctgccagaatgtgaaacaaaccattttagtatacaagggatatgagtttattagatctttgaaagaactgaaatagcactattattccttatttacacttttttccatcttattctaaattcaacaatacaaaatttgaacatagggttggctagctactagaaacacaaagacaaaagtgagaaaatacattagatcagtttaacacatcagagatctccacctgagttcataaataactattacacgctggccaggcgcagtggctcatgtcagtaatcccaacactttgggagactgaggcaggcagatcacttgagcttaggagtttgagaccagactgggcaacatggtgaaacctcatttccataataaatacaaaaaaacagatgggtgtggtagcgtgcacctgttgtcccagctactcaggaggctgaggaggaaggattgcttgaggttgcactgagctgagatcgcaccactgcactccagcctgggtgacagagtgagaccccatcaaaacaaacaaaaaaccataaagcccttcttttagaaagaaaaaagtcagaatgagtctctctaaggaaatagttcagtaagttgcttcgttaactgatttttttgaagataaacttgattcagaatgcatttatgccaaactatcttaaatttggcactgcagataacgttaacctattcatgtttctttcaggcctatgagagaacaagtctagtttatgtttaaaccaataatttaatgtgtggtgtctatatagtagatttaacaatctctgaatagaggtttgaggtggctggtaaaccccaacaatgctggaggtggtttacaatttgagtcggttcatttgatactaacaaatcctaacactgtttctgaaaacatcactgagctaatggaaccattccctacatgagaaattgctatcatgtaagccacatttagcaaaaaatcctacggttcagagcaactcatcttagtctgcttagtacacgttgcatgatggttaacaacggtgaagtgaagattcacagtggggagcaggctgcgctcccctcaacttcccagcacctggcacccaccatgggcagattgggagagacaatattttcaatgtaccaaggatggtggtaacaagagtaaaacacttctctaaacgtgaaaaacttcaagcttatcatctagcaggagagtttttgtttttgtttttgttttttttttttttgagatggagtttcgctcttgtctcccaggctggagtgcaatggcacaatctcagctcactgcaacctctacctcccgggttcaagcgattctcctgcctcagcctcctgagtagctgggactacagatgcccacctatacacccagctaattttcgtatttttagtagagatggggtttccccatgttggccaggcttgtcttgagctcctgacctcaggtgatccgcccacctcgacctccccaaatgctgggattacaggtgtgagccactgctcccagctaatttttgtatttttagtagagacggggtttccccatgttggtcaggctgctctcgaactcctgacctcaggtgatccacccaccttggcctcccaaagtgctggggttacgggcgtgagccaccacacctgggtgagatttcttagatggcttgtccttactttgcctcactttctaacccccgatgggatccgatcatatctccccacccgcaagagtagagaaggaagactctgcaaggagaacagcatcaactcacccaagtgtgtgcaatgcacgatgtggtttcagagcctcacacagtagcttcactccatcatcctgaagatcattttctcccaaatccaagattttcacattatgattatggctgagggcattagccagctctccacagccctctcttgtgaaagaacaacctgacaaactgcaaaataaaaacatacaaaaggggggaaagtaattgcgtcccgaagctgtgctgtgtttacaactgcccatctcacgtccaaggaaaggagacaccctgaagccagacttttgtcccaagcctcgaaggaggagggtgcgagtcaggagggccgagacacctccaggtgctctatttacctgagatagaaagccgagggcacagcaacacagccctctccctcccacgccccccgcaggtgcatgaacgtgaagggcctctctgtggtggttaccccccagcacccagagttggcttggctatcacagtgcacgattctcagccttcaagctcgacagttgagctgaagataccaggaatctcccataacggcaggtctgaatttcccagaataaattactataccataataagttcaaaatagttaatccaggtgactatttggagaaaatatgggttgaggtggggagggatgaggagaggaaagacaaggaagcgacaggaggagaaagagtcat[138 bp omitted]tggtgaaaccccatctctactaaaaatacaagaattatccaggcgtggtggcgggtgcctgcaatcccagctacttgggaggctgaggcaggagaatagcttaaacccgggaggtggaggttgcagtgagccgagattgcaccattgtactccagcctgggcgacagagcaagagtctgtttaaaaaaaattttgactacgtgaagaacgtccatatggctaacccatcaaaggccaagtgtaagagaactgccaggctgataaatgatacatgcaaatcaaagacagtcagatttccctagagtttagacatggtggtcaaagggtacaaaaatctcagcaggaatataattgttgtttttttttttttttgagatctattccatggcatggcaaacatacttaatagaacattgtacctttcaaaattgctaacataataaatttcaaatattgtcaccacaaaaaattgttaagtatttgaggtgatggacacattaactaacttaattattccacattgtattcataaagtttgtacccccaaaacatatacagatggtaaatttacaataaaacgattaaagttttaaaaacaagaaagaattccctacaagtgacgaggggaaaaacaaaatgaaacaggttaaaaaaaaaatcagcaaattttatcaacaggtttttttaatctggaagtttttatcaatggttgtcagcatttgaaaacatactcaacttcattcttataaatgcagatgcaaatataaaactactttgtgtttacaaaggaagaggtatgacccacgggatgggcctcaaaataatcttagagggagaaattagttcaacca[140 bp omitted]ggtgaaaccccatctgtactaaaaaaaaaatacaaaaaattagccgggcatggtggcgggcacccgtagtcccagctacacgggaggctgagacaggagaatgacgtgaacccaggaggctgagcttgcagtgagctgagatcacaccactgcactccagcctgagtgacagaacaagactccatcttaaaaaaaaaaaaaaaatctagaaccaggaatcccatttgacccagcaatcccattactgagtgttggtgaagctttagatgaaaggagataggccataaatcaataattgttgaagttcgagcatggattgtaatatatgctcttctctctaaagtttcaaaatcccctggaagaataacaaatcccttgaccggccaggcacagtggctcacgtcttggtacatgctagaccgcacataaccagcactcagtaaaaactctgggctcagggtctctaatgggctgccctggtagaccacacttggcatgattgccacagctggtggctggaggaattgtgtgtcctgtgtgatgttggagagcaagcttggagtcttaaggaaaagacgagcactcagacaaaagatttctcagcaaagcaaatttacctctgcacagaggagtgcttctctttggcccgtcgccacgagagcacatagaacaaaggagaatgaaagtttttatccctgatgcaaatcctgaccccgtgccctttccccattggctggggtcggaccacacaatctcaactagacctgattggctaaacgtttgaactttttcttagataatgtgggcacttaagggagagaagggagagtaagggagagaggggagagggggaaaagtcgtctgcgatgagctggagagctagttttcttcccaaataaggaaaggaaggtgagctaatactgataagccactggtgctgttagcatgcctgggcacgtagtaaaggcagaaagaaagagaaggaaagggaaggggagcggtactgtggattgaagaagaaaggattgatcaggctatttgaagagaaaccttgtcatatcccacatgtgattgcacggggagagggctcctgggagcttatgtctggtttcctctggactctgtcccaagcccctttccctttgctgatctgccttgtgtcctttcaccctgatgaagtgtagcatgaatacgactatgggctggatcccgagtcctcccagtgaaacatcaaacccgggggctggtctcgaggtcccccagacacacacacattcacggtcctcccactttccccatcccacacccccgacaaaaccagaagctcctccatggcaaagagcttgtccacgcctcattcaaaccccatcaggaactcaggcattggtgggtcaattcccatggctctcctccatctgccaactcagagggagccaagaaaacttacttcaggctctgcaggttaccatctgggcgacccaaggcctcacacaggaacttgactccctcgtctctcaggctgttcttgctcagattcaggtgtgtcaggctcctgttctgcaggagagcatctgacaagtgcttgcaagcgggtgctgccagctggcaaaaccagagcctgcagggtgaaagccacagagatggacactcagggaagcagcccagacccaggctcctggaacagagcctcagggccccctccgagcctacacatgcagcagctccctggacgacaaggtctttctttttagctggacaccgacccaggctatggcagtatcttgcataccataaccctccctcgatccagatttctacagtgagtacaccaagtctgtggttctcattagtgactggtttaggaaaaaataaagaaaaaaaaaactttcaaggctccaaggctctggagccagttgggcgtgggtccaaatgggcttgtctgtcagcagctgggtgaccctcaacaagctcccgcactcctttcagccttcattgccttccattctgaagtgcagtaggatggtctggcagagagctgccagtgagcccacgagcagtgcatgtgcttgggacagcacttggcaaacaggcagtgtacaggttatagaagattattatatcacaaatagagatggcatatattagatatgcatgtattgcataatatgtgttaacatataagttttatgaaaatatatgtagttacataatagtatatcgttaatatattaaatattaactatatattacatacatatattgcataatacatatatcataatgtaaatatataatgaaatatatgttacaattatacatgtatatatgtataattacaatcaattacattataaattataacaactaattgttataatatataaataactgtaatattagtcataattatataattacaattataattggttaaaattacaacctatatgtatatgatgttacaatgtgtagaattataacagttataattatactaattattagggctataatagagttgtaataatatattagggttgtaatactaattataattagttataatggtgttacaattctacacattgtatcatgatcatacacgtataattacacacgtatgattaactcacattatgtgtgtgaatcacctatcgataatcccattcttggagactcagtgccgaatgagcagtgaactggcaaaggagcagagggccagagtctgtggttctccgggataatcaacttggtgacacctaaaggtccttggccttttctgtgctttttatactcacctgacaattgtccagtctcaggaaaacccacctttccctctattccacacctgcaccagagcagcacgatgcagctagagaagaggagacctaaagaatctctttgtgcgtccaccactgtacggggtctctcattcccacaaggcaatcttctagattcccgcagtcctgcctacaacggctcacgtaacatctctgaatggcatctcaagctcctatacccccaacccaaactcttcttacccagaccctgctctgcccccaatcttccctgcattggagaatggtcccaccctttacctagctgccaacctcaccctctgggaggtgttcttggtaccctccctcctaaaccacctcgaatccattggcaaaccccattggctctaccttccgatctatcctgaaatcctataacctccccatgggccactccctcctggtcaataggagccctatctcttgctcatactggtatttttgtccggactgtagtccacctgtccacagcagcctgcatgatctttcaaagtacgtcagattaaggtaacatcccacttccaatccaaggatgactttccatctcactcaagacaaaacagattcctacacagcccagcatatcccaggcactgccatctcctaccactatcaccctcactctactccaaccatgctagcttcctcattgttcctccaacatgctgtgcttattccaaccttttgagatggagtctcactctgtcatccgggctggagtgtagtggcacgatctcagctcactgaaaccttcacctcctgggttctagcgattctcctgcctctgcctcctgagtggctgggattataggcaccatgcccgactaattttttgtgtatctttagtagagatggggttttgccatgttggtcaggctggtctcaaaattcctgacctcgtgatctgcccgcctcagcctcccaaagtgctgggattacaggtgtgagccaccttgcccagcccaacctcaggcctttcactctgctgttccttctccgcatacggctgcctcccccttgcttcatctgagtctctatttaagtatcacctgttcaaataggttagtgagagaagaccctgctgggaaatcaaccccatccctgtcattctactctcgttctactttgtttttcttcatatctattgttttgtttttatatgtcactcataaaactataccttccacatgggcaggaagtaaatctgtcatatctaccaccccagccttgaggccttgttctatctctgctagaagctcacatatgagttgaccaaaaaattcattacttcctggggtcctcgtggaaattaagtttcttggcaaaagctccagagacgggatcaacaaatccaggatgctactctgaatctgttttagagcaattcctggcacatagtaattactcaatgaatgttactttttaataatataaatagatatcaaatgaagaaaccattgttctagatatctgtgcccatagagtcatatctagaaatggaagtagggaaaacttactccagtctctctaaggcacacttggggtgagtcagggccgcacacaatagctttatgccatcatcttggagccgattaaatcccaggcacaatcgagttacgtgttggatgctggtgagaaacaaggctaggtcctgacagctggctgccgacaagttgcatttctccaggctgtggaaggtgcaggtgcaaggtgagcctcagccatgatgcccaggttcctctacctttctctctcaaccccttaacccccgagacccaaacattatgggaagattaaattggagaaagaacaaaagcttaaagaaggagaaaaagggccaggcgcagtggctgacgcctgtaatcccagcagtttgggaggccaaggcgggtggatcacctgaggtcaagagttcgagagcagcctggccaacatggagaaacctcatctccactaaagaaaatacatatatatatacatacatatatatacacgtatatatacacacacatatatatgtatatatatacatatatacacacatatatacatatatatatacacacatatatacatatatatctgggcatggtggtgtgcacctgtagtcccagctactcagaaaggctgaggcaggagaattgcttgaacccaagaggcagaggttgtggtgagccaagagtgcgccactgtactccagcctgggtgacagagggagactccatctcaaagagaaaaaggtgaggcaaggtagggttttctcagccctattgaggtgtgggctggattgcacttagttgcagaatgagaggactgccctgtgcattacaggatgtcaataataactgacctttacccactaggtgttacccactagtagcaacccctacaccatcaggacaaccaaatatgttgtccaggcattgccaaatgtcccctgggggacaaaaatcaaatcatccccagtttcaactaatttaatagaatccagttgaaaacccctggatttggggagaatcaaagaagcctaaggaaattatgcaaagaaaggctgccgtgtgagatagccatgatcaaagtgaggggaaaactggctggaactgagacctaaggtggtaggaagaaagaagaggccaggcgtggtggctcacgcctggaatcccagcaccttgggaggccaaggcgagtggatcacctgagttcaggagttcgagaccagcctgtccaacatggtgaaaccccatctgtactaaaattacaaaaattagctagggatggtggtgtgtgactgtaattccagctattctggaggctgaggcaggagaattgcttgaacccaggaggtggaggttacagtgagccgagatcgtgccaccatactccagcctgggtgacagagtgagactccatctcaaaaaaaaaaaaaaaaagacagatgatagacagacagacagaaagaaagacagaaagatagaaaataagtatgtcaatgtgataagtaaatgcagtagggggatccctaaggttccccaaaacctacccactgccacccccactgtgccactccagcttgcaaagaagatgctttgagaaggccgcaagacttacgacagctccttcaggggacacgttggtagcgtggaggactccctcaggcttctcacatcagagagatcattgtctcccaggctgaggaagttgagacttgtgttctcagtgagtttgagaaagagctgacaaatctggtaggtaaggccacaggactccaacctatcacagaggccccgagacagaccgttactctttgaaagagtgatctgtgtttacagacccccccctgctccatgaatgaaagctgactttctccctcttccccatccctttcagaggttggatggcccgcatgtcaacgctactcaaagcatggtccatgatccagcaagagcagcatgacgtggtagcctgttagaagtgctcattcttaggtcccaccccaaatgtgcaggatctctgcagttgagttcctgggatctgtattattatttttttttttgagttagagtcttgctctgttgcccaggctggagtgcagtgtcacaatcttggctcactgcaacctccgctcccgggttcaagcgagtctcctgcctcaacctcctgagtagctgagattacaggcatgtgccaccacacccggctaatttttgtattttttagtagagacggggtttcaccgtgttggtcaggctggtctcgaactcctgacctcatgatttgccccactccaccacccaaagtgccgggattacaggcatgagccaccacacctggcctggaatctgtattttaaaacacccactaggttgggccgggcacattgactcacgcctgtaatcccagcactcaagaggccgaggcaagcagattgcttgagtccaggagttcaagaccagcctgggaaacatggcaaaaccccatttctacaaaaagtacaaaaattcactgggtgtggtggcacacacctgtgggtaccagccactcgggggctgcagtgggaggactgcttgagccaaggaggcagtggttgcagcaagcagagatcacgtcattgcactccagcccggggaacagagtgagaccctgtctcaaaaacaaaacaaaataaaaaataacctcccccaaggtgaggctaatatacattaaaatttgagaaccacggctctacacataggaacattctcctttgctcatccttctctgtctccttttgctacaaggctgagtgctgtcagccctcccagtggatcgtggaagctactggtggtcttgcaaccccccttgacagatctagggagccaaagacttaccacagatacttgaggttgcaagctgagtgtctcaaagctttaagaatcagggggacagtcattcccagcttgttagagctgaagttcagatgggtcagcttgctgttaccctgaagggcaataatgaggtcctgcagaacccactcaggagttaccgatttgcacctgaggaagggaagggacatgaaagctggattgggggagaagactggtttccaggatcccgtctgcctcctcaccctgccttctactacactcactgccaaggttatacacggtacacaaggaattaaaaacaagggctgagccatggtactggaccttgaaaataaaaactaaaatatactccccccaaaaaaatcagtaaactcagttgcaggtacgaagtcagggatccctccttccctctccacctctcctagagacctgccatgaagaggtcctggggccacctattcttctaggaaatgacccccccatatacacatacaatccaacctagaaaagcccagcaataactctcttgcattttctgaacttctttctccttatcttgagaactaagtacgaccaaaagtttaatattaaaagaaaaatttaaaaagaagactgcccaatcccattactgggtatatgcccaaaggaacgtaaatcgttctattataaagacatatgcacacgtacgttcattgcagcactattcacaatagcaaagacaggaaatcaacctaaattctcatcaatgatggaccaaacaaagaaaatgtggcacctatacaccatggaatactatgcagccataaaaaaagaatgagatcatgtcctttacaagaacatggatggagctggaggccatcatccttaggaagctaatgcaggaacagaaaacaaaataccacatgtcctcacttataagtgggagctaaatgatgagaacacatggacacatagtgaggaacactggggcctgttggaaggtgaagagtgggaaaaggcagaggatcaggaaaaataactaatgggtactgggattaatatctgggtgatgaaataatctgtacaacaaaccccatgacacacatttacctagtgacatacacttgtacccctgaacttaaatgtattttaaaaaaataaatgaaggccacagccccctctgcctgcctctcatgagtttggtccagctcacccaatacactgaggtttgaggaaagttacgatcaaacctttcactcttaactggttgaatcaatgcacacatctaggctttagaccttgaaaagtaagacctaatggtgggggaaaagcaaggtagaattcattggcctagacaccagatcattcaaacaaatcccacctcagattcaaagctacgcattactctctcctctatagttcccccccggcttaattgttatacaaggtccacctccatttgctaattccttcctatcttcaagccagatctgagacactgtcattcattcctccttggatcatattagcaggggaccaatacgctttagtccacagctgtgctccagctccagagaggaccctccccctgctcacctttattttaagaggttctatttttaattcacatactttttcccttttctgcagctcatgtttctccctaattcatcccaggacaagcctaggaaaccctggtgttgcctccaagaggaaagacatacacatcaaatgcagcagtatgctgataaatattaccactggatctccaggaaaaaaaaaaaaagtcctaatttatagctttgccaatttctgtggtgtaaattctccaagccaatcatggccaatttcgatctgcccacttgctgtcactaaatggagttacaaagataggtacacacacacaagtggctctcaccaggttgtagcagctggctccaacatgtcactggacagaaatacatgtccagaattggtaatagaaggcctgatggctttgttgatatcatttgaatatactaagtacattctcctcatggtgccttctatctcgttttcttggcttggaatgctctttttccccaggtatccatgggcacagtccctcctccttccctacactgagtcaagtcggtctttacccaaataccttttcagtgaggcccttctgcctttcctacctaaaaaatgcaagccaccttcctcctcatacatcctttctgagcccccagttttctttgggagatgccaccctcttgggtcctattttgatgattttgtttgcttccctgacacaatgtaagatccctgatggcaggagttatctgtgggcttcactgctagaacctcagaactgagaacagaacctggcacacaggagatgtccaatactcactgaatgcaggagtacccatcaaacactacctacttttgcttaagacacgaagcagtctcagactacacgtgtctgtagctcttcttgagtgctttgagtccaccataccctcgaagttttctactccttcaaatccagctcaaaacaggactgaggccctagggaaaaattactttgtccacaggtgcctctaatgcgagatcattcttgatagatcggcattttaaaatttcagcctactttgcccaagtagcagtttcataaatacaagcacagtttattttatcctcctgagcacgtagcttgccttctggcaaatagtcaaccacactcatcaaaagagagaagttgggagattctcctagggtatcttcttgagctgctggcgtctcacacttacgtcagtttctggactttgcatcttggatttttcagtgcaagacagagacccttcacagaggaagcatgaagtttgctgttactcaggtctagctcatgcagattctcatttgtgaccaacgtagagcaaatgctgttccatgcgtgcatcctggaatcaaacttgcttgtccttcatgagggagagacagaacacggataagagcaaattagcctcaagcaatacccagaatacaacctacgggacacagaaagaaaccctaacaaaattattataattttcctaatgtggctgggtgcagtggctcacgcctgtaatcccaccactttgggagaccgtcgggagtttgagaccaccatggccaacatggtgaagccccgtctgtactaaaaatacaaaattagccaggtgtagtggtgcatgcctgtaatcccagctactcaggaggctgaggcaggagaatagcttcaacctgggaacctacatctgtcagggtgtgggggttgcaagaccacccctagcttccatgatccactgggagggctgacagctctcagcattgtagcagatggagacagagaaagatgagcaaaggaaaatgtccctatgttagagccatggttcccaaatattaatgtatatcagcctcaccttgggggaggttattttttattttgttttgtttttgagacagggtcttactctgttgcccaggctggagtgcagtgatgtgatctctgcttgctgcaacttctgcctccttggctcaagcaatcctcccaccgcagccccccagtagctgggaccacaggtgtgtgccaccacacccagctaataaccactcagtcatggacattcagttagatacaagtagatgtcttagcacaatgcctggtacttaaaccctccatattcaatgcctaagatataaagatgtctttaagttgatcaattagattagctaggaaactaggtgatgcctaaaggacaacattctttcaagttagagctgctccagaccatttggtcggaaataagcacgaatacataacgacaacacatccctggttttgcatgaaagaatttgcacagagcctgagaaaacaggagaaagctgagaaagaaatggtttgtaatactcactccagaatttccaagtccctttcaaggatgtgactgctaacagaaagccttagcttatttaaccttttacagtgctttaggcaaaatgaagaagcttggagttcttcgtcctccaaaatattaaggtcaacttcaaagatacgacccaacatcttctttgtgaagtcttcctcctgggactcgtgtaggcagtgaaaaagtcgtagaatgtgaaattggagagaggcactttcagccttacctaactcttctccccactttaataattcctccattaccctgggagatattttacaatgcaaagtatcttccagttctcttgctatgtttttatttaaaagaccaaagaagaacagaaccactggagtccagtaggcttctttgtcaagcaagacgtgttgcagtaacatcttcatctcttgtggctttgtggaatggggagggaattctctaggttcctctagcacaaaggacatggctgcaaaaaactcctggaaacttaggtgggtgaaagtagtgcaacccccacagtcattgatcttttgaagaatattgaactcgtagagagaatcaatgaaaggcacttccaggccctcgatctcagtgtcttctttgttaaacgtgaagttcatagaccacagcccttctatggccagactgcagagggccctccattgtcctggccagctgtcatctgccaaatctacctctgctgtggagaacaagttggagaaaaaataggcatacagactggtggtagtctgagtgattgactggagatcgtaatacctcaccttcggctgcttcagacaggaacatacggtccaacacaccatgggggcactgcaggaatgaaagagagtttcgttttttcttagctgctgcaggattttctcaacttcacttgagtcatcaaagtgtctcatgaaatatacccgtaggtcgtcccctgtgaaccctgtaatttgtacaaagcatggattcactaatgaggccttaagatctctcacaaaccaggtcttgatcgtgatcagtaaggtagccaggggaaccaattctttcttcaacaagctgtgtaggattttggtcactgggagctcctggtaccagtctgtacatggcgagccatcatccaagctctcagagcgtgactcagatatgattatttcctcaaagccatcaataataaacaggagcttctctggttgagacatgaactcttcaatgggggcatcaaaatcgggccaatccaaagaaatcaattcagcaaaggtagtttccttcatgtaccttattttatggcagctgagatagaaaacataggagaacctttgctgaaagagaactccatttgcccagtgcagcatagcctgcattgccaaggtggtcttcccaacccctgccctccccaccaagactatcgtctgggcctgggctctagtcctattaggatccagtaggcgctgcagttcctcatgttcgtcctttgatgtattacggatatatacgtggtctttaggccaactgatgttgtcccatgtctccagtagttcagccttcatgttctctctgtattttcttctgtggtctagagagggcggagtggggagaagaatggtaagaataaatttcagagttaggaatgattcagttacaaagttcctaccccaaagacttgaataagagaaactctgccttccaggattttgtgggaatgcagtggtagaaagttgcaaaaggaggctgaggtaggagaatggcgtgaacccgggaggcggaggttgcagtgagccgagaggcaccactgcactccagcctgggtgacagagtgagactccgtctcaaaaaaaaaaaaaaaaaaaaaaagttgcaaaatatgaagacagttaaataatttgatgatatatacaaatgaaaaatacagaataacataagagcgatcaagaacacctttaagagagggcagagaagggatcatagcgagaagcctctcactagaggattctacactgagaatggagaagaatcatcagaagagaagtcagtctggggtactttcaggcggggggaaggccaaggtgaatgcccacccagaatttttttctgcaagcctcgtgagtgtgcccactccattgcctgaccagctcagcaccccaaagacaccttctagccagtagagggggcccatgagccctcttccctcaccagctatcaggttttcctcacttcctcgaaacacttcagagcaacaagggatttgggcaggtcagagtcccccactcacagaaggctgacccgactcgactcacaagggaatcagtaactgtagagcctgccagttttcctggtccctgtgcccagacagcttcagctggtgagggcttagactctaggttgccctgaagatcaaggctttgtctctcccattctccccattcctgggtttcttcccaaaatgactactgtggggccagtcacagcacaagggccaggacctctacagaggctggggtgaggagtgattgagctagcgattcttagaggccttctggggcctactacgtatgctgagacagaaatgagcattctagagtatagtgaccaaggcacatggtaggaggctggatcgtgattatctttgctttgaaaaccaaggaatgagatgccgtaatttatatttttagaactccaggttttataaagaatagattatgatgcatcagtgtaggaaaggaggtagagaaaacaagtagaaagctactactatcttcatctaagtgaaaatgggcacctggcagactagaatgtatttgtagaatataccccatcagtatatgtaactattacatatctgcaaaaaatttaggaatgaatggtaatcaccattctactttctacttctatgagttcaagattcttagatcccatatattagtgagatggggcagtaattgcctttttgtgcctgacttatctcacttaccataatatcacaaatgatagaatttgtgttgtcacaaatgatagaatttcacaaatgatagaatttccttctctttaaaggctgaatagtattctattgcatctataggccatattttctttatccattcatctgttgatggatacctaggttgatttcatatcttggctattgtgaatagtgctgcaatgaacatgggagtgaaaatctctttgacatactgatttcttcttgccaagtgaaataagccagacacagaaagacaaatgccagatgatttcacttatatgtagaatctaaaaaagtaaaactcagaagaagagaataaagtggtgattactagaagctggggaatggcacggggaaaagagagggaaaggagaaattttgagcaaagggtacaaagtttcaggtagacaagaggaacgagttctgtgatgtactgcatagcaatgtaactgtagttaataacagtgtgttatatagttcaacacttcagaaaaagtagattttaagtgttcttaccacaaagaaaaagtaagtgttgtggattaaggaggttcgagatggctgactggagacattgggtgccagttcttagaaccaaaattacaaataggtaattacagccatgtgcggtggctcatgcctgtaatcccagcactttgggaggccgaagcaggtggatcacctgaggtcaggagttcgagaccagcctgaccaacatggtaaaaccccatctctactaaaaatacaaagattagccaggcatggtggcacgcgcctgtaatcccagctactcgggaggctgaggcaggagaatcacttgaacccgggaggcagaggttgcagcaggccaagatcgcaccactgtactccagcctgggcaacggggcaagactctgtctcaaaaacaaacaaaacaaatagataatcacaattcaaacagagtatcaggagagaatattcgagcccaacagagaactcataggaagaagctggggcacagaaaaaggaagagaagccaactcagccagcagagatcagctaggataggcttgccttgtccagccccacccaacttcactcccacccctccatggctgatcatggagcccaagctcctatgcatttcacagaccagcccattgcctgatgcacaagaaagtttctcctggtaaacaacaatcaagcataaaagctactgcaactgctgcagctggctctaacctgcacgtgtcatctactggactagatgtcaaactacacaacccaatacaaaagctgctaacacaagtaaacagtgcttgggaaccagataagctttaagacctcactaacctggccccacaggagaccaagagcctactcacacacctagtaaaccactactaaaaccacatttagaaagccactgcactaatactgtctataaccaaggaatttatagagtctttgtcaatgaaagcactcagaaaagccaaatgaccctactaaacacacattatagtcacatcctcaagggaaaaaatagtcccatctaaacagcagtaaatgcaaaaataagaagtgatagtttcttcagataagaaactaatgcacaattcttggcatattaaaaaaactcaggtgttatgatacccccaaaggattgtactaactctctagcaatggatcctaaccaaaatgaaaatgtaaaaatgccagataaataatttaaaatattgattttaaagaagctcagtgagatccaagagaaatcataaaacctgtacaaagaaatcagaaaataaattcaggatatgaatgagaaatttatcaaagagatatttttgagagaaaaatcaaataaaacttctgcaagtgaaaaattcattgaagttacaaaatatagctgaaagtttcaacaacagattagacaaagaagaggaaagaatctcagaacttgaaggtcttttgaattaatttagtctgacaaaaataaacaggattttaagaaaatgaacaaagacttcaaaaggcgtgggactacatacaatgttggaacctatgaatcataggcattcctgagggagaagaaagagcaaaaagttttaaaaacctgttgtggaaataattgagaaaaacttccctactctggcaagagatccaggcatccaaatataagaggattaatgaactccaaaaaaaatgcattgcaagaagggcctcactatgatatttattcatcagactaagtttaatgtgaaggaaaaaacgtcctaaaaaaaatcagtaagagaaaataatctagtcacctatgaagcaaaacccatcagactaacagcagacttctcagcagaaatcttacaagctagaaggaattggaatttcaaaggttttttgtttaaagaaataaactgttaaccccaagttttgtatccttctacaataagctttataaatgaagaaataaagtctttttcagacaagcaaacactgagggaatttgtcactactagacttgtactacaggaaatacttgaaggagttctaaacatggaactaaaaaggttgatacttgccatcacaaaaacacacaaaactataaaatacaccagtcttataaagcaattacacaaaggagaaagaaatcaaatgatagcatgacacaattccatcaaatcacaaagaaaaagaacaaaaaaatctgcaaagcaaatggaaatcaacattgtaactggaaaaaaggtcatatatcaatattaaccttcaatatacatggattaaatgcgcttcttaaaagatataaattggaggaatagattttaaaacataagccaaatatatgctgcttaaaaaaaaactcatcttacttcactatagactgaaggtaaaggtgtagaaaaagattccacttttccccctttgcttcacaaaaagcaaactggagtagctatacttatattagttgaaagactttcaaccagcaacagtttaaaaaaaggcaaagaagatttttatataatgataaagggatcaattcaagaagatataataatcctaaacatatatacatccataccagagtacctagattcataaaacaaatattattagacctaaagacagcaaaataataatagtgggagacttcaacaccccactgacagcactagacagatcatcaagacagaaaatcaacaaaggaagtctgaacttaaattggactttagaccaaatgaaactgacacacatttacagaaccttctactcaactgcagaatatatattcttctcatcagtgcatggaacattccttgaaatagaccgtatgttaggctacaaaacaaggctcaataaattttttaaaaatggaaattatatcaagtatttttctcagactacagtgaaataaaactagaaatcaatctcaagagaaactcctgaaactatgcaaatgcacagaaattaaacaactgctcctaaacaatctttaggtcaatgacaaaattaagacagaaattaagttttttgaaactaatgaaaatggagacacaacatatcaaaacctctgtgatacagcaaaaaaaaaaaaaaagtttatagcattaaatgcttacatttaaaaaaaaatcacaaattaacaacctaacaatgcaactcaaggaaaaagaataagaacaaatcaaacccaaagctagaagaaaaataacaaatcagagcagaaatagagaccaaaataacaatacaaagaatcagtaaaaccaaagcttggttactttaaaaaataaacaagattgatagatggctagctatactaactaatgaaagaagagaagattcaaacaaacaatcagaaatgaaaaaggaaacattacaactgagccaacagaaatacagatgatcagagactactatggacaactctatactcacaaactaaaaacccaagaagaaatagataaatttctgggaacatacaacctaccaagattgaatcaggaataaatataaatcctgaacagatcaacaacaaggagtgagtgaatcagtaatttaaaaaattaataacaaaaaaatcccagtaccagatgtatttcacaaccaaattctacaagacatacaaagaagaactggtaccaatcctactgaaactgttgcagaaaaagatgttggagaggagggagtgctctctaattccttttattaagccagtatcatcctgatgccaaagctcaacaaggacacaaaaagacaactgcagaccactatccctgatgaacataagtgcaaaaatcttcaacaaaataccagaaaactgatccaacaacacataaaaaagataatacaccatgaccaagtgggttttaacccaggaatacaaggacggttcaacactcacaaatcaataaatgtgattcgccacataaacagaattaaaaacaaaaactatatgatcatctctacagatgcatagaagcatttggtaaaattcagcatcccttcatgataaaaaccctcaacaaactaagcttcaaaggaacatatgtcaaactaataaaagccatatatgacaaatccacagcccacattatactgaatgggaaacagttgaaagcattctccccaagaactggaacaagacaaggatgcccactttcaccactcctattcaacacaaaactggctagtcatagccagagcaatcaggcaagagaaagaaataaaaaggtatctaaattgtaaagaagaagccaaattatctgttgatatgatcttatatctagaaaactctaaagacttctctaaaagactcctagatttgataaatgaattcataaaatcttagtattaaaataaagcaatgtacaaatatcagtagcctttctatactccataatgatcaagctgagaaccaaattaagaaggcaatctatttacaatagcttaaaaaaaaacacctaaggaatatattcaaccaaagaggtgaaagatctccacaaggaaaactacaaaaagcttaagaaattatggatgacacaagtaatgctcgtggataagaataaatgtcattaagatgaccatattttccaatatatcaattcaatgcaattcctatcaaactcccagtgacatatttcacagaattagagaaaacaatcctaaaattcatatggaaccaagaaagagccctaatagccaaaacaatcagaagcaaaaaggacaaatctgtatgcatcaccttacctgacttcaaattatactaccaggatatagtaaacaaaacagcatggtactagtacaaaaataaacatagatcaatgtaacagaatagagaggccagaaataaagctatatacctacagctagctgatcttccgcaaagtcaataaaaacacgcactagggaaagggcactctattcaataaacggtgctgggaaaactggctagccatatgtagaagaataaaactggaccatatctctcactatattcaaaagctcactcaagatggaatagagatttaaatgtaagacctgaaactgtaaaaatcctagaagaaaatgtagggaaaagttttctggacattgccttggcaaagaattcatgactaagacctcaaaaacaaatgcaagaaaaacaaaaataaactgatatgccttaattaagaagtttctacacagcaaaagaagtaatcaagtgaacagataacctgcaggataggaaaaaatatttgcaaagtatacattcaaagggctaatatccagaacctacaaggaactcaatttaaataaaatcccattagaaaatggagaaaggacataagcagacattttttaaaagaagacatagaagtagtcaagaaacatgtaaaaaaaaaatgctcattatcactaggcagagaaatgcaaattaaagccacagtcaaaaaacccaaatgttggcaaggattcagaaaatggaacacttgtacactgttggtgtgaaagtaaattagtacaatatctatgaaaatattaggatatttctcaaagaactaaaaatagaactaccatttgatcaaacagtatcactattgggtatctattctaagaaaaaaaaatcatatcataaagatacctgcactcctgtgtttattgcagcagtattcacagtagcaaagatacgcaatcaacctaaatgtccattaatggatgactggataaagaaaatgtggtgtatgtatgtatgtatgtatacacatatatacacacccaggaatactactcataaaagataatatatcttacagcaatatggatagaactggaggccattatcttaagtgaagtaagtctgacacagaataacaaataccgcaagttcttacttataagttggaactaaatcatgtgtacatatgtacatatagaatggaataatagacgttgaagactcagaagggtggaaaggtaggagggggttgagggacgagaaattcctttaataggtacaatgtagactattcaggtgatggctccaccaaaagctcagactttaccactacacgatatatccatgtaacaaaatggaatgcaaaccacatattgagtcaagacagtatttctgttaatttggcaaatatttggaagaatttttattgatacttggaaggaaaaagacacccacaatatcataacggatgatattttgttacagccttttagaggatcaatttgactataagctttagattatatatatatgtttttgtctaggagtcctactttaagaatgtcttctacagaaatatttgtggatatgcacatatgatatggacatttatcaaagtattgcttaatgttttttaaaaagctggaagcctagatttctgtcaacaggaaaaggttaaatacaaaccatgacacatccatacaaaggtatatggcaaaagaataataaatattacctgttatgatcccagaaaaagagattaagttaaggatctggagaagaggaacttatcctggattatctggggggctaatacaattgcacatatcatcctaaagtaggagcagagggagatgaggcacagacactcagaggaaaagacatagcaggtggcaatgaggccacagagttggagatgagagtcatgaggccacaacccaagaaatactggaagccaccagagctggaagagaccagaacagatcttccccagagcctttctactgacatgttgatttcagttaattggtatattagtctgttctcacactgctagtaaagacatacccaagagtaggtaatttataaagaaaaataagtttgatggactcacagttccacatggctggggaggcctcgcaatcatggcagaaggcaaagcaggagcaaagacacaacttacctagtgggaggtgagggggcatgtgcaggggaactcccctttataaaaccatcagatctcaggagacttactcactgtcatgagaacagcgagggaaagatccaccccatgaatcagttacctcccaccaggtccctcccatgacacatgggaattatgggagctacaattcaagatgagatttcggtggagacacagccaaaccgtatcatttggcctgtctctcaaagaggttttttttttattgttgttttttgtttttttgtttgtttgttttttcagatggagtcttgctctgtcactaggcttgagtgcagtggcatgatcttggctcactgcaacctctgcctcccaggttcaagcaattctcctgcctcagcctcccaagtagctggagctacaggcacacaccaccatgcccggctaatttttgtatttttagtatagatggggtttcaccatgttggccaggatggtcttgatctcttgacctcgtgatctgcctacctcaacctccccaagtgctgggattaccggcgtgagccatcatgcccagcagagttgttttaagctatccagtttgtcatacaattggttaacagaggccctaggaaactactgtagcatacaaccttcattccaagactcagcatcaatttatatgcccaggatactgaacactgatgctgctacacccaggagaaatgataatgttatgggaggatagaagggaagacagatacctaacaccatgacaagaagtcagtagataaccgattggaaaactaagaaatagcaggaaatattaatcacttatgaccatagaaacaaatatcagaagtagccccaaagagtagtgggtggatgtctctgtagagcagacctcaagagctggctgggaggattgatgctttgcattacaagctctatgtccctgtgattctttggggcttgtatacatgcacatgtacttctttgataaaactaaacttagaactagaatgtatgttttactttctcagagtgacaatctccatagggccactggtacaaaaactacagatgcctattaattcacctgttaaaaggtaatctcaatatcagttatttaacaaaagcaccaagtccagaagcagacaccagtgtgtgagaacctacaggaaaaacagagaatcccgtttatagtaacctatttttctgtaggagatcagtcagggtggtgggagaagttgtaggaaaaatgcaaactttcttggaaggctgggggagagggggttgcaaagctttggggaagaatgagctgaaggcatggttcttaccctggggcaaaggccaagtagtaggtacagaagaatgcagggaagtttatctgaatagcttgtttatcatgcctccagaaacctggcctttcatcacccacgcgcaggagtagggggtggaaggggcaccaccatgtgaattgcccacaagtgtgttgactcaaggcctttgtcattaaatctgttctaaataaatgcccgcagtgccagcttgtcagggcagcagctgctgactctttatagcaccctcctcagtatctgtgggcagcccagtcccctagcctgctctttcactggatatctgtgtctgagtgcattttttcattcgttgttcggccagggtctgcgggttggacctggcatttttcaacaaattgtactggaagaaccagttgggaagagcttttaatttattgcataccataaactgaagaaaatgtcagtatgaggcaactctactatggacctagtgaaaccaatgctcgtcaagcaacctgtccattatcaacataaagtagtatacacacctgcttcctctagcatctctggttcttcttggtttggatcttggcatccctgggcctgtacattccctgaaataaacagtgatgatgagatatgaaaataccccagactgaaaatgggccacaatgataaagactctcagtagaaccaactctttctatggcaaacttgagagtgaagagactggagaaatcagcatgcccagtttatattttttatttatttttaagaaatggagtctcactctgttgcccacgctagagtgcagtggtaccatcttggctcactgcaacatctgcctcctgggttcaagagattctcctgcctcagcctcctgagtagctgggattacaggcacacaccaccaggcctggctgatttttgtatttttagtagagatggagtttcatcatgttggcaaggctggtctcaaactcttgacttcaagtgatctgcccaccttggcctcccaaagtgctggaattgcagatatgagccgttctactcagccgtaagttattatttaataagaaatactggaagaactagatggaaagagtttttaattttttatgtaccataaattcaagaaatttcagcataggcagcaaatgtggaccaatgaaacgagtgttccatcaagcaacctgtcaattatcaaccaagtaatgtacacacctgtttcttcttctagctcgtctagttcttcttggtttggatcttggcatccctgggtctgcatattccctgaaataaacattgacgatgagatatgaaaataccccagagtgaaaatgggccagcaataatggaagcccccagtagaaccaactttttctatggcaaacgggattgaagagactggaggaatcagtatgcccagtttacagtaagttatcatttaataagcaatactgaaagaattagttggaaagtttttaattttttatgcactataaattcaagaaatttcagagtaggcagcggatgtggaccagtgaatgagtgctccatcaagcaacctgtccattatcaacttaaagtagtgtacacacctgctgctgcttctagcatctctagatcttcctgggttggatcttgcagctcttgggtctgcacattctctgaaacaaacagtgatgatgacatatgagaatacccagactgaaaatggaccagcaataatggagtctctcagtagaaccaactccttctatgacaaactggagtttgaaggtctgattcctccagttttctcaagctccattagcccaactgaagatgcagtgtgcactctggaaagtccacagcacacgctaagcacattcctgcctcagggccttggctccagccctccccgctgcctggattcccagacatctgcttagctcactctcaaggctctgctgaaatcttacctccacaatggtgcctgataatcctaatcatgactaccacctatatctttaataacataccttagcctctccccatctgccttatcctccgtttgcacttgtcaccttttaacacaccatgtgatttatgcgttatgtctattgcctgtctagggagatggctagtctgtttacggattcatcccaagtgtgtagaacagtaccccacacagagaagccactctaatatctttggagtagaatactgtaggaataaaagcaccaagaattgggttcaaaccaagtccctcaatttgctgcacatcaccactctgaatgtccccttcctcatgagctagaagacctcttctataactcacagtggccaaactcactttactgtgtagtacatagctgctacaggacaataccttgtaagggatttgcatctagagatatggctctaatatttacaactccattgcttgtcactgtttacatggcttgttctggttagcaagctgtgtcctgcacttcctccagatgttccatgttccttcaaagaacaagaatccatcattctacacccatgttagcctaggccaaataatcccagctctctgaagctccacagaccctacctgtggagtctgagccctacgtccacatatttcaagctgaagtctgtcctgaattctaactctcctggaagcagggagcccgagtgggaaccttttcctagccatagcccaagcagaggaaaagtagacgattttcccctcttcactggctctgtttatccaaaagccaactgtttgacatgtggcattcctctgttgcaaacgaatccaacgatgtgagccttccaggttatagctttactgtcaagtatcaggcatcaccatctggatcttcatagattaaatttaagactccaatttagctgggaccacctgtcagaaaagccaggctattccagatgaacagcctagcaggactagtacatggctgcaaagagaaaacaaaggttaaaaattagtaagttttcacttattctccctcatgcttagggaactttgcaaggacatgaaggaatagcgaagagcgggcatatggaagttccactggtcactcaccaggcctaggcattcctccattctctggtgaggcgcacttatctgagtatgttttaaatgccagaggagcatgttttaggtaaccagcctacccttcctacacccaacattactccccccaggctccataggtttacttagtggtgtctttatcctaatcctagcaacccctcaatgtagggaagcaccggtgatttacacataattatgcacttaagtcaatgtggtccctgttcccattgcatgttaaacctcactgcccatgcggagggtggtgggggaaatcttggccttgtcttaaaggtccccccaaaaaaatgctttactgggaaatgattcctacataatttaaaatgcaatgcatgaagaatatagagtaattttaaacttttatgtatataatgaaataactttgaaaagtatgaattccacccaagcatagccaaatgatttttgacaaagatgcagaagcaattcaatagataaagagctcttttcaacaaatggtgctggagccaatggatatctataggtggaaaaaataagaagaaaaggggtagcaacctaaactttacaccttatacaggagaaaaaaaaaaccaacccaaaagagagaatagatttaagtataaaaggtaaaaaccagcccagcacattggctcacacctgtactcctagcactttgggaggctgaggcaggcagatcaccaggtcaggagtttgggaccagcctggccagcgtggggaaaccccatctctaataacaacacaaaaattagctgggtgtggtggtgggcgcctgtactcccagctatttgggaggctgaggcaggagaatcgcttgaacccggaggcagaggttgcagtgagccgagatcatgccactgcactccagcctgggtggcagagcgaggctccatctaggaaaaaaaaaaaaaaaaagagtgaaaactatatgacacatttgccttcgattattctcctttgcctgtgaaataaagtctaattccttaaaaaaaaaaaaaaatcccagttctggacttccatttgtacacctgtggaagcctgaaatagattcttccactgcaaattcacagacatatccttgggtggggtagagggtgtgtgtgtagtgaggtgacactctcccagctctgatactgctggccaggcaccatgcttaaacaatcatccataaaccaccagggcaagtgacgctttcagataaaaaaaactaccccaaagatcaactaacatgcaagttcctactctgtgcccagtgccttctaagcatttcactctagaaatgtagaggttggaacagtgaccccagtttaagaaagaattgtggccccgtggtaaaaatcacttgtccaaggttaccgttggtcaaatggaactagcctttgaatccagacatcctgactccagaacctgagcccttaagccaatagtccccaaaagacagtacgtgggtccctgtatacacagttgtgtccgcaaactcactctcagatgcatatcccacaacactggtcaagtacagaaatactcatggtacagtttcctagatgatggggctaacagggcactaagaaccacctgatccaactgctgagcttttatcgtcccctgcatggctggtgaggtggatgtggcccagggctttctcctacttgagaggtatcttccccatgacccacgcctttagaaggccaagtaggaacaagacaaggaccagggaaacggggctcctgtgatgtgccccgcctggccctgcagccttcaggcaggaagtttatgccgccattcgaaatcagcaacaagaaacaaaggataaatgcttgacgggagggacaccccatctaccctgatgtggttatgacgcatcacttgcctgtatccaaatatctcatgtaccccataaatatatacacctactaagtatccagaattttttaaatttaagtttaaattttaaaaacatcagtgacaagaaacaggataaatgcttgaggtgatggacacactccatttacccctgtgactattacccaatgcatgccagtatcaaaatatctcatgtaccccataaatatagacacctactatgtatccaaaaacttttaagtttatatttttaaaaatcagcaacaagaaagtaagttcttcctttgagagcattctcctctgtgctaattcctctctccaggtctctataaagagagatattcagttggaaacagaatttaagagttctaaatctctattttcaatctctgatatcctttcttcatgactaaaacaccaaaagcatggcaacaaaagccaaaattgacaaatgggatctaattgaactaaagagcttctgcacagcagaagaaactgtcaccagagtgtacaggcaacctgcagaatgggagaaaatttttgtaatctactcatctgacaaagggctaatatccagaatctacaaacaacttaaatttacaagaaaaaaaaatctcatcaaaaagtgggcgaagtatatgaacagacacttctcaaaagaagacatttatgcagccaacaaacatgaaaaaaagctcatcgtcactggttattagagaaatgcaaatcaaaaccacaatgagataccatctcacgccagttaggatggcgatcattgaaaagtcaggaaacagatgctggagaggatgtggagaaataggaacacttttacactgttggtgggagtgtaaattagttcaaccattgtggaagacagtgtggcgattcctcaaggatctagaactagaaataccatttgacccagcaatcccattactgggtatatacccaaaggattataaatcattctactataaagactcttgcacacatatggttattgcagcactgttcacaatagcaaagacttggaaccaaccgaaatgcccatcaatgatagattggatgaagaaaatgtggcacatatacaccatggaatactatgcagccgtaaaaaaggatgagttcatgtccttcgcagggacatagatgaagctggaaaccatcattctcagcaaactaacacaggaacggaaaaccaaacaccgcatgttctcattcataagtgggagctggacaatgagaacacatggacacagggaggggaacatcacccactgggcctgtcagtgggtggggggctaggggagggatagtattagaagaaatacctaatgtacatgatgggttgatcggtgcagcaaaccacaatggcatgtgtctacctatgtaacaaacctgcacgttgtgcacatgtaccctaaaacttgaagtataataaaaaaatgaaagtagaaagaggaaaataataaagataaaatcagaaatcaatgcaatacaaagcatgcaatagagaaatcaataaagcctaaagttggttctttgaaaaaaaagaaaagaaaagaaattaagacagtaaaaaaaagaattctaaatctcattccctagttttctgctttacatctgcctattccaaacaagagtatctgagggctttaaaaatgagagagggacagggaaaaagggtggagtggtgttctagtctccatctcatcctcctttccaccagaagatacacaaagcccgaacttgtatgactccgcatgccccgtgtccagggttctgatatggaagactcagtattgcccactctccttccttagaactcactcatttgagggtaggagaagctgtacaaggtcaagcacagagcctttggagacacactgcctgggctcatgtcccagctctcctggtcaccagctctgtgactttgggaaatttacttaagctgtctgtgcctcagtttccttctctgtaagatacaagtaataggacctccttcttataaatatagtgaagagtcagtacaaatgtatagacagcattaagataaatgcctggtttatagccaggcatggtggctcacgcctgtaatcccagaattttgggaggctgaggcaggcaaatcacctgaggtcagaagtttgagaccagcctggccaacatggcaaaaccccgtctctactacaaatacaaaaattagccgggcatggtggcaggtgcctgtagtcccagctactcgggaggctgaggcaggagaatcccttgaacccaggaggcggagagtgcagtaagccaagatcacaccattgtactccagcttgggtgacaagaaggaaactccatctcaaaaaaaaaaaaaaaaaaaaagagtcaatgtctggtttataacaggcaccaggaaacatgattattttcaacagctctcataggcagtcagttcttttataaagtgatgtgtgcattctgaaaactcaccacagcagattacatggtgcactaagaccagacggcttacaggagatagaatcagtgattatatatatatatatatatatataaaattttaaccagaagcttaaacagcatggttttatacttgctgattaattacaaaacactttattaccacaataaacactgcacgatcctacaacaccacaatcagccctgtaacacctcagcaggtcttgcaatgccacagaagatgtggcatgaaactttaccctgagtaaaacatgaactttgcttgtgaatatgggaagtgtcgcagcttgtgagtttttgtgaagtgaaagaacaatgatctgaaatcagacagaaagtgtagaatgggcaaggctcgtactgaggaagcgggtagatgtttgaggtacatgcctgtgtgcattgtgtacaatcctacatggctctgctcggctgagtgcagggtcggtgggttgcgggggcagggcgggggttgttgtggtttcttagtgtttctcttgggcaaaaccatgcataagctaacatgaaatctgtgctgcactcaaattgttcccagtacgacaatcacactgggacaaatttgcatgtttaaaagaagcctgggctgggcgcggtggctcacgcctgtaatcccagtgctttgggaggtcg[134 bp omitted]gaggcaggagaatcgcttcaacctgggaggcagaggttacagtgacctcagatcgcaccactgcactccagcctgggcgacagagtggagactcaggctcaaaaaaaaaaaaaaaagaaagaaagaaagaaagaaaaaggcttataacataactgaatgtgcctcttccgattccctttcttgcctttgctactccttcccaggctagagcactaaatctttatagcctttatgcctttaaacatcatactgtcatagattatcaaggaggatttgtagggggagatcggcagtgtggaatgaccccacaaaaacccagcggctacctccttgcctcaggagtaccaagcagccctcccgccttccttcttgaggactctcacctttcatctcggctctaactttctcacacagtgaggtcagattcattgtctggaagatgccgaggaccactttccatgcctgaccttttgggaagtgttcatccaaaagaaaggacagattcaaagggtcggcagctctcaagtttgcccaggggatacgcgggaagtgcccctggggggccgaccagaagtccatcagctgctggggttccaagcaaagcttgaattcctccagctgatactgatccagggccatcaggtaaggcagaagcccttggttggtaccaccgttggggcaggtgattacagaaaagttcatcttgcccaacacatgcagtttctcacttcagcaaaggactcctatatccacaggacacttgtgacctgcagaaaaggagagagttgaaatcataagccataaatatcacctcctctcactgtcttgcctacacatttgagtattttcgcttcacagtacttcctgctacttgtgttagtacacttttttgttgttgttttgttttttgagatggagtctcgctctgtcccccaagctgaagtgcaatggtgcgatctcggctcactgcaagctccgcctcccgggttcacgccattctcctgcctcagcctcttgagtagctgggactacaggtgcccgccaccacgcccagctagttttttttgtatttttagtacagatggggtttcaccgtgttagccaggatggtctcgatctcctgaccttgtgatccgcccgcctcggcctcccaaagtgttgggattacaggcgtgagccaccgggcccggcctcaactgggtattttctctagcaaccttacctagactcgagatcactggctttcatcccatcccagaaggaacaatgccatcagcacctgatttatctgccttactaacagtgacagctgtcctagaaaagttacaggtgcatgatggtacttaccaactcacattcagagggttcacctgaaatgtgaataagaagaacattgaagttaattagtcacagtaaagatcaaagacatttgagagatgggaacgggggaaactaatcagggagaaggggtaacaaagagagaaaatagaagtttccgcccatcacgattttggccaccaggcagctaatggtgattgagacagatctgccactattcccccatagaacctggtccggcatgtatgctgggtcatgtcaaaataccaggtagtattgaaggcaacagatagacagcagaacaaaagacttttttttttgtgatggagtttcgctctcgttgcccaggctggagtgcaatggctggatctcggctcactggagtctttgcctcccaggttcaagtgattctcttgcctcagcgtccgagtagctgggactacaggtgcatactggccttggcctcccaaaatgctgggattacaggcatgagccaccatgcctggcccaaaacactatgcttgaagctactggtgtgtgacccccgaatgtctcccaaagagaaatctccagaagagatgtatgttaggacctaccctggcagcccaaattcattggactactccagaaattgttggagaaaagatggggaaagacacacagaggaaaacttgaaacatcatgaagaaaagccctttcaggtataagcagggaggataaagactaggggaaaagcttatttgagaatcaaatgacattaagctatcattgaacacccagtagaagctgagcaagggggctgggcgcggtggctcacacctgtaatcctagttttaggaggccaaggtgggcagatcacatgaggtcaggagcttgagaccagcctggccaacatggtgaaaccccgtctctaccaaaaatacaaaaattaggtgggcatggtggtgggtgcctgtaatcccagctactcaggaggctgaggcaggagaatagcttgaacctgggaggcagaggttacagtgagccgagatagcaccactgcactctagcctgagcgacaagagcaagactgtctcgaaacaataaaaaaaaaattactccatgctgcacttttgttgtatgtctcttgtttaaatttttaaaccgagaagaactgaggtatcacatcagccaccaacaaactcctccaagattatagggttaggttcccgtgagcctctcgtcacattttcatccactagtcaatacataaccttgttttatatgtgtctctgtttaaggaaacctaatttaatacatatcgttgattcattaacattgagcccaccgccagcaacactatagctcatgcctgaaagaagctcagctaacgcatgcattttcttcagaactcacatcccagccttcttgtgtgtcgagcaccagacagaacttccacactacacaaggggacgtttagacagcaaagtcaccgacgaaaagcccagaaatgcaaaaacagggcactaagtagacccaccagcactgccttatctgacctcagctcgaatttttcctggctctgtgcatgtctggatgactttgaaagctctgcaaatattgatttgggggttgccagcagatcttagcgtgtagatgaattcacacacatggaatccacaaataaagaggatgaactataattaggatgaagcatgttgggtatgagacccacatggtgccatgaagttatacagcaagtaggccaagtacataggactcgaaaggaaattcctccaaacttgatgcatgcatcggattgagccaaggagggtgggaagaggattagggggtagagcggtcagtgaaaacagcaagtgcaaaagccctggagggaaaaaaaatacaagaacagagaaattcagctagaaaatctcacacaactgcggaatccccttggttgaggagatggaaagctcctaatcgaagaaggaagtgtgtgcgatcaacttttgctcctaagaaaacaccagcaggatacagtggagtaaaaggtcccagagaaaggtgaaaccttagagcagagagaggagacgtctcttaccaaccagactttgaatctcacatgagtttccagaggctgattcgggaaaccccatagaagtagtcaccgccaccccctcctcacctgtgagcagccctcgggtccgtctgcctcctcttagctgtgtctcggggcctcctgtttatagctctcttcccgctccctttccccagcacaactcggggtcagttgagaagctgacaagactcagctgagacgtacgatatctggtttttctcctccagatctagataatcacaggattcttcaggctgggaggccaaactgggtttaaagaccatactatcctgaagtaaatggagccatccacgccagcaaagagccacagatgggagtaatgcctgtgattacccctcctaccatctgggcgacctcaggggacaatgaaagaggagagggagacagaggtcgtgagacactaaaatcacggttgccgccacttacaggactgtgtcttcttccaactgcaggagaaatgctccttccaccattccatcatgaatacaaaggattttccaccgaagtcaggaacaagatgaggatagtcataactccgctgctattcaacattctgctggagatgtcaaccaattctatcaacaatgttagctagttttaaactcgggttacaggctttaaactagcaattggaaagcaattagagagaggtataataattggaaagcaacaggtaaaactacatttgcaaacttgattatgtacccggacaatgcaaaagactgcatgggagaactatcaacaacaagagaaattggtattacagcaggtaataaaataagtattcaaaaatcaatagacttcaaatatggaaactcaaaacactggaaaagaatacccctatttactatagcaaaaaaaaaaaaaatggaaataaaatgcttacttaaaaacttcagaaatatccaaaacttatgtaagaaaaactataaaatacatttctgcaagatccaaaagtggacttaagccttaaagaaataaataccacgtttttgcatggaaagctcaacctcataaatatatcacttctctctaatacaaatacatcaaggttttacctggaggtgcggaagtggattataaaattcaactgaacaaatcgaatttgtaggaatggcctggaaaatcctgaaaaggaggaatgaggagggactaaacctagcagatattaaaatataccatgaggcctttatgattaaaatatagtattggcacatgtgcaaacagactgggcaaaggaacagactagaaaatccagaaatagggctgggcgcggtggcttacgccggtaatcccagcactttgggaggctg[133 bp omitted]gaggcaggagaatggtgtgaacctgggaggcggagcttgcagtgagtcgagatggcgccactgcactccagcctgggtgacagagggagactctgtctcaaaaaaaaattaaaaaaaaaagaaaaggaaaaaagaaaatccagaaataaaattattaacatatataaatttgataaatattgcatcactcataagtgagggaaattgacttttaataagcatggtgatgctagatctgtttcctatacaacagaataattttcaagcacgtcagagatttaaatgcataaataaaactttagaagcaccagaagaaaacaattgaattcctctcaaacctgatggtggggaaagctttcttagctaagatttaaaattcaaaagcaattagagaaaaaataaacaaattttattacaaatgttttttaagcattcataacaaaagatgtgtgaagcaaggtaaaaagacaaactataaaatggtaaatatatttgcaacttatatcagaaagagtttatatgcctaatatttatttatctatttatttttgagatggagtctcactctgtcacccaggctggagtgcagtggcgacatctccactcactgcaacctccgcctcccaggttcaagtgattctcctgcctcagcctcccaagtagctgagattacaggcatgtgcacccatgcccaactaatttttttttttttgtatttttaatagagacagggtttcaccatgttggtcaggctggtctcgaactcctgacctcaaatagtctgcctgcctcagcctcctaaagtgctgggattactggcgtgagccgccatgcccagcctatatgtctaatctataaagagctttgaaaaattaccaaaatgaaatggagaaattaacaattgtttgtaagcaaagaaatgccaatgactcttaaccatctgaaaacatgctgaatctcctatacaataagagaaatgcaagttcaaaattatacacattcttggctatttcctgtaaacctaatgaaactattttacctttgattttctctctgctgttgtctgaagacacatcatcataacctttgtgaatataaaactcatacatagcccgggcatgatggcacgtgcctataatcccagcactttgggaggctgaggcaggagatcccttgaggccagaagttcaagaccaggccaggctgtttaacctgtgatacccccgtctctacaaaaaattagccatgagtgctgtcatgcacctatggtccctgtcgtcagaggcatgtgaaccagagcaactccatcttgaaaatgagctgggtaaactgaggctgagacctactgggctgcattcccagatgtctaaggcattctaagtcacaggatgagataggaggacagcaaaaaatacaggtcataaagaccttgctgatacaatgggttgcagtaatgaagccgccaaatcccaccaaaatcaagatggccacgatagtgacctctggttgtcctcactgctacactcccaccagaaccatgacagtttacaaatgctgtggcaacgtcaggaagttaccctatatggtctaaaaatgggaggcatgaataatccacctgttgtttagcatatcatcaagaaataaccataaaaatggcaaccagcagcccgagggctgctctatggagtagtcattctttattcccttattttcctaataaacttgatttcactttacgaactcactctgaattctttcttgcaagagatccaagaaccctctctggggatctggaccgggacccctttcctgtaatgccgtttactccagaggctaaggcagaagattacttgagcccaggaagccgaggctgtggggtgagttatgattgcaccactgcacttcgtccggagtcatggaacgagaccctgtctcaaaaatatacaaataaaataaaattgaaaaaaattaaaactcctatgtaaaaaccgctgatattctatcctgagttgatgcaaacttggtaaagttggttatcttgtggggtttctccccttcaactataggtgattattactattattattattattattattattattattattattatttgagacggagtctcgctctgtcacccgggctggagtgcagtggcgcgatctcagctcactgcaagctccgcctcccgggttcacgccattctcctgcctcagccttccgagtagctgggactacaggtgcccgccaccac[131 bp omitted]caccgcgcccagccaactagtggtaatttttttaaaagaaaattcctcaagccagtccttcccaacgccccctcccttgtactctctgctggtgagttttccttctcccacaagctctgtctctgggtctccctgagactgggcccgttgtatgtgggacctagactgggccctgatgatcttgagaccctccttttgctcgatacaattatatcccaagtagaagagatgaacatgtaaacaagatgagcccgtgaatgactggatgtttccaaatgggaagtggcactttcggactgaacacggtgttagccttctaaggagactgggaagctctccaaacatgtaattttctgttgcttgttcttctagacctaagaagcaagggaagagtttcctttacaaatcggaagcacctgtaggatcaagacctgcagctcattcattctgaatcaagggagctaaatgccttccaatcggtgcaatgcagaggaattctagtgagccagcccccgccaatgggaagagaaggtgccaattgtctgaattccccggcacctataagggttggggggtggggcaggccaggcgatctccgttttgggagatgcttttgacaggaaggagcaggaagaataattctctgcagaggtgagctttgttttgttttgttttgttcttttctcttttctacctactcttttcctcatcatccacttccttgcagttacaatggctagacccttgagttgggcgcacccagtgggcccatactgaaaatcaaaagtgagagctagagattcaactgcaaacataaccagctctcattcataaaatccttgcccatctctgaaactcagctttcctgaccccgaagtggagtcctaaattcccaagttttctttcagctctgagggtctgagagccaggagactcatagcactagcaaaattctaagacctgaaagagatgtcgtggggtctccaggtgtccagaggtctagggtagccactgacagatgtagttagaaaaaaatcaaaatagctgtagacgcgaagaagaaatcgcgaggcacagagaaagaaagccgcaaggattaagcagcactgactttgacactgcccctctgcaaatattccttctcaataaacgcagatgtgtcacccacacggctcggctcgtgggcttaggaatttggtcaggttccacctgctggtttccaacactcacagcttgggctgaatttacttaacttagttcaatttccgttttctcctttgtaaattggacggaaagggattcatgggatataattcttaccaaaacgtagagttatatggactctagggtgatcaagacgtgaccacagaaccaaatggagatgacagacttttatcttttaaaaatgtttacccgctagaatagctatgtttaaaatggaaaataatcagcgttggcaagaatgtggagaaaatgaaactttagtgcattgttgatggggatgggaaatggaaaatagtatggcgattcctcctgctgacctcaggtgaaccgcccgcctcggcctcccaaagggctgggattacaggcatgagccaccgcacccggcctgctttttaatttttaatttttctgggtacatagtagaggtatatatttatggggtacacgagatgctttgatacgggtatgcaatgtgtaattaccacatgatggagaatggggtatccgtcccctcaaacatttatcctttgtgttacaatccaattatactattttagttatttttaatgtataattaaattgccatagactatagtcaccatgttgtgctatcaaatacaaggtcttattcagtccttctaattttttgggcacattaaccatcccccactttcctccccacaccccacaaccctccccagcctctgaacaccacccttctactctctatatccatgagttcaattgttgtgatatttatttatttagagacaggttctcgctctgtcacccaggctggagcgcagtggtgcgatttcggctcactgcaacctccacctcccgggttcaagcaattctcgtttctcagcctcccaagtagctgggattacaggcacccgccatcacagctggcttatttttgtattttttgtagagacagggtttcgccatgttgggcagtctggtctcgaactcctgaactcaagtgatctgcccacctcagcctcccaaagtgctggaattacaggcttgagctaccgtgcccaacctgttttaatttttagatcccaaaaatatgtgagaacatgcaatgtttgtctttctgtgcctggcttatttcatgtgtagatgatcctgatatacttctgtagggaaggaaatacttttccctctctctctctttattgatcttagattccatggctctctctttattgatcttagattccttggctggagtctgtgcattaggctcatgaaagacagattaacaaaagcacagcaaacagaagtttatgtgtgcatacccatgggagcactccatgatgagaacactcaggggtggttagaacttaggcttatatgtcatgctaacaaaagaacaatacattctcttttttttgagacggagtttcactctgtcgcccaggctcactgtaacccccgcctcccaggttcaagcaattctcccgtctcagcctcccgagtagcttggattacaggtgcccgccaccactcccagctaatttttgtacttttagtggagacagggttttg[141 bp omitted]aaagacctcgaattcctgggggggtaaattgtgagaaggtaaatgtatgggggagaaaatggaggatgagggctagttcataaggtttcttgtgtagatttttctggcgccctcgcactgctgtacgcatctggagcttgtctccggtgattaacttctgtgtttcctggtagagaaggggaaaaggggcacctttacaaactgatgtcttgcatttaggcaaatcaagggaagacagattttttcttgtgtctgctccttctcaagtatcttcagctcaaaatagtccgtttgaaatacacaacaaattattatgaactatagtcacactactgtgctatcaaatgctagagcttactccttctatccattgtatttttgtacctattaaccaaccgctcttcatccaacccctcccacctgcctttcccatcaatatgtacaattatcacgtaccaatttttaagaatgagtacaacaaactggaatatttgggggtggcgtattctgccgtccctcatttctctgaaaggccaggaactccttgctcagacccatcaaccacctgcatctggacgtgtgctctccaccctcttcctgccaagatcacttcagacccagcctgtgtcctcaattataccccttctcctgctgttatttcctcacttgccaacactacttttctcttctctactcccttgaatgtacagacatcccacagcatttccatctttaggaaaaaaaaatttttttttgagacggagtctctctctgtcacccaggctggagtgcagtggtgtgatctcggctcactgcaacctccacctcacaggttcaagcaattctctgcctcagcctcatgagtagctgggattatagacgcccatcaccatgtctggctaatttttgtatttttagcggagatggggtttca[141 bp omitted]atggaaagcggagcagggaggagggataaagagaggttggttcgtaggtattagaaagggaagagggaatgagatagaagatgccccactgctgcctttgaagaaggaggaaggagcaaaaatccaaggatggcatgtggcttctagaagctggagaaggccaggaaacagattctccccctagagtctccagaaggaaacagccctgccaacacctcaattttagtccagtgatcttagcccatttcaggcttctagcctccctaactgaatgttttatcttaaaaatactgtgctgtcggccaggtgcggtgactcccacctgaagtcccaacactttgggaggc[134 bp omitted]gaggcaggagaattgcttgaacctgggaggtggaggttgcaatgagccgagatcgtgccactgcactgcagcctgggtgacagggtgagactccatctcaaaaaaaaaaaaaaaaaaaaaactgtgtcgtcttaagccaccaaattcatggtaaattcgtcacactagtgcaacaactcacaattcttctttccaggattatgtctatagctccctacccttgttctcagtaggagagccagccagaagaatccttctaaaaattatagacgtcccacgccagtccaatcaggtcctgtgtgacctcttgagatcacctccactgtcttccccttgcccattcacctccactcaccctggtcctgctgtttctcaacagctccaggcacgtcctggccatagggtggtggtccttgcccttctgtctggaactcatctgatagccacacagcccattccgtgacctcttacctcctcctctcctccaagcttttgctcagacatccctgcttcagtgagccctttcgtcagccttttacaaatcgcagcaggctatttctcacttcctgttctctctcgcctctcctttttcccatggtgtgtatagtcttccatcgcatcagtgtgctcccatgggcatgcacacataaataaacttctgtttgctgtgattttgtgaatctgtctttcatgaccccaatgtacaagcctccagccaatgaatctaagatcaataaagggacagagaaaagcttttcctcccctacactttattttcattcactgaaatcttagccacatgaggacaacaattttttgtgtatcttttgctcaccaacgtatccccagtgccaaaaatagagagtttggcgtaatatttgacactgggatatttcagtgagtaaatccagaaggactgtgttatgaactgaatgtctgcgtccccccaaaatccacaggctgaaactctaaccaccaaggtaacggtagaagaaggcagggactttgggaggtgattaactcatggggccagagccctcatgattgggactccagcccttatgaaagagcctccagagagttcccacaccccttcctccatgtgaggaggacacagcaagaaggtgctctctatgaaccaggaagctgccctcaccagacactaaatctgccaaccccttgatcttggacttccagcccccagagcagtgagaaatcaatgtctgttgttactaagccacccagtgtatggtatttgttatggcagtccaaacagactaagacagactggcttgtgcacacaccatctcacatgtgcaagtgtatctgtaaggtgcagtttttttgttgt[131 bp omitted]cctca[133 bp omitted]agcctcccaaattgctgagattacatgcgtgagccaccacgcctggccttttttgtttttgttttttttgagatggagtctcgctctgttgcccaggctggagtgcagtggcgggatcttggctcactcactgcaaactccccctcttggtttcaagtgattctcctgcctcagcttcccaagtagctgggactacaggtgcatgccaccacgcccagccaatatttgttttttttttttttttttttaagtagagacgggttttcaccatgttggccaggatggtctcaatctcttgacctcgtgatcctcccacctcagcctcccaaagtgctgaaattacaggcatgagccaccacacctggcctcaggttgcagttttaggagtagaactactgaattccatggcagtgcacacgattggtagtattgtgaaaaggcctttcagataggttccccctgcttatgttcccttcagcagtgaatgaaagtaaagcaaaacgatgatgtaactgccaacatc[132 bp omitted]ttgcaacctctgcctcctgggttcaagcaattctcctgcctcagcctcccgagtagctgggattacaggcacccaccaccacgcccagctactttttgtgtttttaatagaggcagggtttcaccat[143 bp omitted]tggtcagcaatggtcatggaataagtagaggtagaaaatgtgtgactgtgttaggctcctccatgcagcgccacccactggacggaaggagcactagcaagagtcagccacccaggagcatatcacctttgtcctgggaccaagcccagctactctggacccaagggaggactgagtcaattaaacaagtttatccagatgtttgggtgtcacataagttataagagggagaagtgttaaagaagaagctattggccaggtgcagtggctcacacctgtaatcccagcactttgggaggctgaggtgggtggatcacttgaggtcaggagtttgagaccagcctggccaacatagtgaaaccccatctatactaaaaatacaaaaaaattagccaggcatggtggcaggtgcctgtaatcccagctactcagggggctgaggcaagggaattgcttgaaccagggaagtggaggttgcagtgagccgagatcacaccactgcactccagcctgggaaacagagtgagactctgtctctaagtaaataaataaataataaataaataaactattattggaagttggggcaggggggacaaaaatacacccatgatcctttttattttatttcttttttacatttcttttagatacaggggtacatgtgcaggtttgttatataggcaaacgtgttatgggggtgggtttgttgtacaggttatctcatcacccaggtattaatcccagtacccattagttatttttcctgatcttctccctcctcccaccctccagcctctagcagactccagtgtgtggtgttccctctatgtgtccatgtgttctcatcgtttagctaccacttataaatgagcacatgtggtatttggtttcctgttcctgtgttagtttgctaaggaataatggtctctggctccatctatgttcctgcaaaggtcatgatctcattcttttttatggctgcatagtattccatggtgtttatgtaccacatttttttatccggtctatcactgatgggcatttaggttgattccatgactttgctattgtgagtagtgctgcaatgaacatacacaggaatgtgtctttataatagaatgatttatattcctttggatatatatccagtaatgggattgctgagttgaatggtagttctctttttaggtctttgaggagttgccccactgtcatccagagtagttgaactaatttacactcccacacacagagtataagtgttcctttttctctgcgacttcaccagcatctgttattgcttgactttttaataatcaccattctgactggtgtgagatgacatctcgttgtggttttgatttgcatctctctaatacatgatccattttttaagaatacagcatctgttattgcttgactttttaataatcaccattctgactggtgtgagatgacatctcgttgtggttttgatttgcatctctctaatacatgatccatttttttaagaataaaaactttgttgaatttgagatcacttttaatctaatggagccttctaaccaaccatatattttctagattttagcttcactgaattattttacctgcttctaatttttcttttcgctaaaccttttgtgaaggctttgatattttgcttgcctcttccccaaaagaagtcatggagaatagaaactacaaacaatccattagtctaatggactaatcccaaacattccatgcatcttcagtttttccatagggcagagaatctttgaggaaaggaggtaaagggagtacccggcacgcagaatacctgccaagtaagcattacacgaatctgttttcttgggtagtgttttcatcttcttgttttattgttttatgtctctgcaggtctcgtgtttctctcttccaatcggttgtctttatcgtggacactgaggtgttctctgccttgactaaagatgagtgacgtgaatccaccctctgacacccccattcccttttcatcctcctccactcacagttctcatattccgccctggacattctcttgctaccccggctccccatgtgaaaatggggtcatgctgtacatgagaaacgtgagccatgaggagctacaacggttcaagcagctcttactgactgagctcagtactggcaccatgcccatcacctgggaccaggtcgagacagccagctgggcagaggtggttcatctcttgatagagcgtttccctggacgacgcgcttgggatgtgacttcgaacatctttgccattatgaactgtgataaaatgtgtgttgtagtccgcagagagataaatggtgagtgttgatctggtggataaagtgggggtgggcttggctgctgggcagctaaactactctagtcaccacccctatcacttattggccttctgagcaagaaagcaaacagtggaggaagataatggatctaacccaaaggcaaagactgtcatacgggcatttttttaattttatttttctgagatggggtttcgctcttcttgcccaggctgaagtgcaatggcacaatctcggctcactgcaaaccccgcctcccaggtacaggtgattctcctgcctcagcctcctgagtagctgggattacaggcacccaccaccatgcctgggtaatttttttttatttttagtagagacggggtttcaccatgttggccaggctggtctcgaactactgacctcaggtaatccgcctgccttggccccccaaagtgctgggattgcaggtgtgagccactgtgcccagcccatatgggcctattttttaaaaacttaactgaatactgcttatatgaggtgaacgttaaatgaagtcatagagaagtaggaagtaaaatagtggaaaagcatatgctatggaaacagcagaagacagctggtatagctatggtgatgtcaggagtgctatatttaaagcaagaaggttaaacactttaaaaggccatttcgcagcaacaaagggtgaatcccactggaggatattgtaatccaaaacctcatcttcaatatgaataaagcagagctggactacagtcatccccttatccaaggttttgctttctgaagtttgggttgatcatggccaaaaatagatgagtacagtacactgagatattctgagacagagagagaccacatttacataccgtttatgatagtatagtattataattgttctatttcattattattgttaatctcttactgtacctaatttataatttaaacttttatcatagatcggtatgtattttttttctattttgagatggagtcttcattctgtcacacaggctggagtgcagtggtgtgatctcagctcactgcaacctccacctcccaggttcaagcaattctcatgcctcagcctccccagtagctgggattacaggtgcgcaccaccacacccagctaatttttgtatttttagtagaaacggggtttcaccatgttggccaggctggtttcaaactcctgaccttaggtgatttgcctgcctcggcctcccaaagtgctggaattacaggtgtgagccaccacacccggcctagatatgtatttaaaaaaatcagtatccacattgttcagtactatccacagtttcagatatccaccggggatcttggaacatagaccctgcagagaaggggggactactgtattaaaggaaaatacaccaatccagaaacatgataggagctgtgaacccgcctctcccaatagctgatattacaagtagtcagtctcattggtaagaatggagaaaacgtcagctccacagttttaaacataaacacaggagagtgggtgccttacgtctccttagccactggcaccccaacagctggctcagcacctagcatgtcataggtgctcaaatattagatggctagagagtaattgattgtgaaaagggactttcttttgataaggcagcctaggaagtcctctttgaggaaatgatgctaaggttgagacctaacacaggaggaaatagctcatcatgtgaaaaggagagagagtcaccggaaaagaaaatcagaggggatggaaaccccgtgacccagtggtagagaaaatcttagtgttaaacagaaa[138 bp omitted]catggtgaaacccagtctctactaaaactacaaaaaaaaaaaaaatagccgggcgtggtgacgggtgcctgtaatcccagctattcgggaggctaaggcaagagaattgcttgaacccaggaggcagaggttgcagagggctaagatcatgccactgcactccagcctgggtgacaaaagcagaactccatctcaagaaacacacacacacacacacacacagagacacacgtacgcagttgatcctcattgttcatggattctgtattcgtgaatgtgcctactcattaaaatgtattcgtaacccccaaatcaatacttacagcgctttcaagatcattcccagacagcaacgcagcaaaaaaatcgagctgacctcctagccgaggtcaaacaaggtgacgctctgccttctggctttagctctcaccccgtaagccagtgtcatttccacgcctatgtggtgccacacttttgtgctttgagttggtggttttgctgtttaaaatagcacccaggctgggcacgatggctcacgcctataatc[131 bp omitted]cgcatctctactaaaaatacagaaattagccgggcgtggtggcgcacgcctgtagtcccagctacttgggaagctgaggcagaagaatcgcttgaacccaggaggcagaggttgcagtgagctgagatcacaccactgcactccagcctgggtgacagagtgagacttagtctcaaaaaaaataagaataaaaataaaaataaaaatggtacccaaaactagtgctgatgtgcctttccatgttcctcagggcaagaaggccatgctgtgccttagggagaaaatacgcttgttagctgagcttccttcaggcaggatttatcagtgtggttgaccacgagctcaatgttaaataatcaacaatatgtactaaataaggtgtctttaaacaaaaacacatgtaaaacaagtttttatattgatcagtccatgaaaatgttgtaaccagagactagcaggaaacaaacgttgtgttttcctgggggcaatggttcagtattagcgaatttggtgttcacaagaattttatagacgagaactaccacacataacaagaatcaatgactatatgtgtatgtgtatgtagagatatacacgtgtatgtacacatatgtgcacacatacatagatattaagctagaagttccttggtatccatgggggattggttccaggctctccctcaagggtactgaacaaattcatgggtgctcaactccttcatgtaaaatggcatagtatttgcatagaacccatacacatcctcccacagacttaaaatcactctaaattacttataatacccaacacaatgtaaatgctatgtaaatagttgttatcctgtattgggttttttatttttttgagacaaggtcttactctattacccaggttggagtggagtggtatgatcatggctcccttcagcctctgcctcctgagctcaagcaatcctcctgcctcagcctcctgagtggttaggactataggcatgccaccatgcctggctaattattttttatttttttagtagagttgaggtcttgctatg[136 bp omitted]ttttattgggtttttagtttatgttccatcctcagttggttgatcccaccgatgtagatcccacggtaatgaaaggccgactggacgtatagatacacccctacgtagatattaaactgtgtatggattttacatacacttgtgtgtgtaagagtatgtgtgtatttatatttctccctcagtgtctggctgggctatccatttataacatgtttttgaacaccttactcaatgcattgtagaacaacaccttttctcatttcctaaaattgctgtgatagagatagatctaggtgattttcttctccctgaacggaggtggtgagaggatgagactctgaagccatgtggctgcttctgtcctaaaaaggccattggctccatgctgtttccctgctaccaagatcttatcattcccgtggaacagcctccttttttctgttacagccattctgcctaccttggaaccagaggacttgaatgtgggagaaacacaggtgaatctggaggaaggagaatctggtatgtgcctgtatcacagcagaccctggtgaaaaaatgggctatggactgggatgagctgctcagttgctaaggcaagccagattttaagttaccatgtccagtgtttcttctacaatcagaaccaacatggcgaaactctgtctctactaaaaacacagaaactagccgggcgtggtggcagttgcctgtagtcccagctacttgggaggctgagtgagaagaattgcttgaacccgggaggcggagggttgcagtgaggtgagatcacgccactgcactcttgggtgacagattgagactccatctcaaaaaaaataataaaataaaaaaacagacacaaaccattggctcagcggtccccaacccccgggccatggactagtaccagtctgtggcctgttaggaactgggccacacagcaggaggtgagtggcagggagcaaccaaagcttcatctgtatttacagctgctccctattgctcacattacctcctgggctctgcctcctgtcagatcagcagtggcatcagattctcataggagtgcaaaccctctcgtgaactgtgcatgcgagggatctaggctgtgctctcctgagaatctaatgcctgatccgtcaccgtctcccatcacccctggatgggaccatcgagttgcgggaaaacaagctcagggctcccagtgactctacattatactgagttgtataattatttcattacatattataatgtaataataatagaaataaagtacacaataaacgtaatgcacttgaattatcccaaaaccatcccccgccacctggtccatggaaaacttgtcttccacttggggaccacttcaatagagtg[138 bp omitted]cctgccttagcctcctgcgtagctgggattacaggcacatgccaccacgcccagctaacttttgtatgtttagtagag[138 bp omitted]agagtctcactctgtcacccacactggagtgcagtggcgcaatcttggctcactggaacctctgccgcctggattcaagcaattctcctgcctccacctcctgagtagctgggattaccggcgtgtgcaccaccacgcctggctaattttgtatttttagtagagacagggtttcaccatgttagccaggctggtcttgaactcctgaccccaagtgatccaccatcctcagcctcccaaagtgctgggattacaggtacaagccgccacacccggccctcccaagtatttctgatttgaatggagataacacggctaacactacagcagcgatcttctatctgtgaggcaagaaatacaaagaaagggctgagagaatcgtgatgctgctggacctgaaactatggcgccactgaacctaatttcaacagctttacgcccgccatacttctcacgtagaaagcagtccttgttttgtttaagccacttcaagctgagttttctgttcgttggtgcttcctagttgacacagcagtatcaggaaaggttatttcatttatgcaagggcatcacggggcttcacgtagacatcgagactggttttcttattgctctattagttcttgcaattcactctgatgtcataccctttatttctcccatctcacaaatctaggtaaaatacggcggtataaatcgaatgtgatggaaaagtttttccccatatgggacattacgacttggcctggaaaccagagggacttcttctaccaaggtgtacacaggcacgaggagtacttaccatgtctgcttctgcccaaaagaccccagggtagacagcccaagaccgtggccatacagggagctcctgggatcggaaaaacaatcctggccaaaaaggtgatgtttgagtgggccagaaacaagttctacgcccacaagcgctggtgtgctttctacttccattgccaagaggtgaaccagacgacagaccagagcttctccgagctgattgagcaaaagtggcctggatctcaggacctcgtgtcaaagattatgtccaaacccgaccaacttctgctgctcttggatggctttgaggagctcacatctaccctcattgacagactggaggacctgagtgaagactggaggcagaaattgcctgggtctgtcctactgagcagtttgctgagcaaaacgatgcttccagaggccacgctactgatcatgataagatttacctcttggcagacatgcaagcccttgctgaaatgtccctctctcgtaacccttccggggtttaatacgatggaaaaaatcaagtatttccagatgtattttggacacacagaggagggagaccaagtcttgagtttcgccatggaaaacaccattctcttctccatgtgccgggtccctgtggtttgctggatggtctgctctggtctgaaacagcaaatggagagaggaaacaatctcacacagtcatgtccaaatgccacctctgtgttcgtccggtatatttctagcttgtttcccaccagagctgagaacttttccagaaagatccaccaagcacaactggaaggtctgtgtcacttggccgcagacagcatgtggcacaggaaatgggtgttaggtaaagaagatcttgaggaagccaagctggatcagacgggagtcaccgccttccttggcatgagtattcttcggagaattgcaggtgaggaagaccactatgtctttaccctcgtgacttttcaggaattttttgcggccttgttttatgttctctgtttcccacaaagactcaaaaattttcatgtgttgagccacgtgaatatccagcgcctgatagcgagtcccagaggaagcaaaagctatctctctcacatgggacttttcttattcggttttctgaacgaggcctgcgcttcggccgtggaacagtcattccaatgcaaggtgtctttcggtaataagaggaaactgctgaaagtcatacctctgttgcataaatgtgacccaccttctccgggcagtggggtcccgcagttattctactgtctgcatgaaatccgggaggaagcctttgtaagccaagccctaaatgattatcataaagttgtcttgagaattggcaacaacaaagaagttcaagtgtctgctttttgcctgaagcggtgtcaatatttgcatgaggtggaactgaccgtcaccctgaacttcatgaacgtgtggaagctcagctccagctcccatcctggctctgagtaagtgcttcggtccctccttgggtagcccgtcctacccggaggccttgactatggtgtcccgggtgtttagggggtcaatctgcaaacctttctgatctctttcctagcctagtttgcacagtacttctgttgctttgttttgttttgttttgttttttgagacagagtgtcactctgttgcccaggctggagtgcagtggtgcaatctcagctcactgcaacctctgccttctgggttcaagcgattctcctgcctcagcctcccgagtagctaggattacaaacgcatgccactgcacccggctaattttggcatttttagtagagatggggtttcaccatgttggccaggctggtctcaaactcctgacctcaggtcatccgcccacctcggcctcccaaattgctgggattacaggcatgagccatcgcacgcggccagtacttctgttttaaaacaaacatatatctacggtgatacatgtttgttttacaaactgtcccagtttgtttaggattaaggagatttctcagacccaggactttgttttactgccaggactgaaggtgttcctgggatataggactttccgtgctaaacctgggagaatactgggcaaaatgagatcccttgttcaccctccctccctctgtgctgcatgcccataaagatgggaccttgcttcatctatcactcctacttctgtttttgagatagggtctctttctgtcacccaggaaggcagtggtacgatcgtggctcactgcaacctcaaccttctgggctcaaacaattctcccacctcagcctcccaggtatctggaatcacaggcatgcaccaccatgcctggctaattttttatttttttggagagatgaggtttccctgtgttacccaggctaatcttcaactcccggcctcaagcaatcttcccaccttggcctcccaaagcactggaattacaggcatgagccgctgcgcccagcctcactcctacttttgtgtatcagaagcttttggtctcaaggaaagtgctgctaatggaacttaacgtgatgatgaagacatcctgaatctgtcttatccaatacaggagccactggccacaggcaaccactgagctcttggaatgtggctggtgtgaccgagtgaatgaacgtttacattttatttaactttactgaatttaaatgtagatagctacatgcagctagtagctaccatatcagacagcacacctctagagggtctttctttccgtgtaaaaa[133 bp omitted]aaaaccccgtttctactaaaaacacaaaaattagccaggcatggtggcgggcacctgtaatcccagctactcgggaggctgaggcaggagaatcacttgaacccaggaggcagaggctgcagatagccgagatcgcgccactatcttaaaaaagaaaaaataataattatatatatatatatatatatatatatatatatatatatatatatatatataaaataaggttgttaaacgtgttaaaatctacaacacactgaataagtccagtccttcatttagtgctcagtagatacaaactgttaccactcatgtaattcctcatcccctccactcgaccaaaactcttccagaagatctttattttggcaaatataatggatttctttttcttaagaagtggcaaaaagcactgactactcatttcttcatattggttgatatttatttggcatttgccatatagcagacacaatgtcaagcacttgctttatgtgaattatttctcccttcaactccatgttgcactggaggtcaggtgtatggagcaccttgtccaaggtcacacatctggtcgaagctaagacgagctaaaatttgacccccgtggctatgacgagaagagagaggcgatttagactgacccctggcgagagaggggacattgtccttctgctgcataatggaaatgccttcttgttccttaactgctctgcgaaaaggaaccacaatctcttccagattcctgtctttccatgaaagactgcataagtcttcagcatatggatgtgtagcgctaatgctcatcctagacatatactgggctagtgtgtggatagataagtaaaagttggtctctccttatgggatgagacatttaaatttcaagtaatttaagttctgttccattcttcaccatgacaagcagtgtgcagggcttctcagccatggctgagtttctccagggcagaggtaagaaagctacagccaggaggccaaacctagctttctgcttgtttaggtaaatacagtttgattggagcccggccatgcttgtgacatattgtctgtgactgttaaccacactgccgcggcaggactgagtcattgccaggaaatttacggccagcaaagctgaatatatttgctacttggtcaattacaggaaaaatttgccaacccctgctctagcatatatttttatttattgtcttattattttttgtagagatgggggtctcactttgttacccagcctggtcttgatctcctgggctcaagaaatgctctcgcctctgcctgccaaagtgcggggattacaggtgtgagccaccgcgtccagccagggcctattttttgttttttgtttgtttgtttgcttgtttgttttgagacggagtctcattctgtcgcccaagctggagtgcagtggtgaggtctcggatcactgcaacctccacctcctgggttcacgccattctcctgcctcagcctcccgagtagctgggactacaggcgcccgccaa[174 bp omitted]atgtatgtttgttagtttgttttgagacagagtcttgctctgtctcccaggctggagtgcagttgcgtgatctcggctcactgcaagctccgcctccctggttcacgccattctcctgcctcagcctccccagtagctgggactacaggcgcccgccaccacgcctggctaattttttgtattttttagtag[155 bp omitted]tcacacatcacatctctaactttatcagcagggatatcacttcatatttcttgggtatgtccctgaaccaaactgagggtcaggctgcttattctcacagcccaataaccagatgcagatgaactgggaaacaagagagtctatttctgtaactgggtacacagggagaaggccaagaaatatcaccagaccaattaaaaattacaaagttttccagagcttatatgccttctaagctatatgtctacgtgtaagtgttcattcctctgaagacgtaagtgattaacttcttctaatctataaggaaggtctgagtcctgaagaccttcctctggagccttagtaaatttacttaaactagatgggtccaggtgctgaggtcattacctttatcttgtctcctgctaaatcatggaggcttggggggttctttcagaccccaataaaacttgtttgtggaggtctggggagtttcttcagacccctaataaaaacttgtttaatcctgaatgggtcctgttgagaattccttcattatcctgtcatacttcaaggcccaggaaaggcctgggcaaaactcttggtggtcttttgttacattccagcctttgtgtgagggcactggctctgtcagcttttaatatttaacttacccactcagtcggtgctgaaactgttgtgatggaggcctgcctgttcagctgctagcgagacctggcctgccacaggtagaatgaattctgttcactcagatattgaatggctacatcagaccatgtttttttcatgtctactcccaacttatgtgggcaattccaacacattccacaaaatcacattcaaggggccctccagtccctgaggaccttttattagggaggggaataaacaccagagcttgttgttcaacttggggataactgttggtcacccgactaagacctcaagaatctaagcacagtgaatcacaatgtctttctatgatgctgcgtaaagacctgacatccgtagaaatcttaagacacgacatatttctttcatgttggttagtccattgatcacttttgtatgggttcctgcagggagttgatatcattcctacttatttgcatttctatgtatttgacggatgtgaaaatggatgaatctatttcatgggatttaaattttatgcaaaaattacgctagtgtaaatattctaaaaattgctttttcatctcatgtgtcttggcaatgtctatacatgccattttcaatgaagtattctttgaaaaataggtgtgctagagatgat[135 bp omitted]cctccgcctcccaggttcaagcgattctctttgcctcagcctcccaagtagctgggattacaggtgcccaccaccacacctgtataatttttttgtatttttagtagagacagggtttcactatgttggccaggctggtctcgaactcctggcctggtgatccgcctgccttggcctcccagagtgctgggattacaatgtgagccaccgtgcccggccactttcaactatttctttaatgcaaccaacagcaatcttcacatgtgtatcttggtcagcctctctgaaacgattgtatggggaagaatgaaagagaaagtcagcaggtccttctacggccaaactacatgccaatctagctctggatttttctttcttgtactcactgtgtcaaaaagattaatttttcctttattctgatcctatatttttttaaaaaataagaattatatatacacagggtaagaatgtaggtacagaatataattcaatctctgccccccacataaatctcatgtaattaaaaaagcaattcctggttaggcacggtgattcacacctgtaaccctagcactttgggaggccaaggcaggaggagcgcttgagcccaggaattcaagaccagcctgggtaacatggagaatccctgtttctacaaaaaatacaaaaatcagtcaggtgtggtggcgtgtgcctgtaaccccagctcctcaggcagatgaagtggattgcctgagcctgggagttagaggctgcagcgagctgtgttcagaccactatactccagcctgggcggcagagtgataccttgtctcaaatataaataaataaaaaataaaagcaacttccttttttccaagtcatgggaaaatacagggctcttatttgtgaccatgagtctccctggaatgaaatgagaaacctcgtgatggtttttctgagtgctttatttaaatgaggatgtcttagagtcactagaggcctatggccctaaccaggatagggaacaccagccctggggtttcctagtagattttctccagtttaacgaagaggtgttttctctcttctcccttccatgtagagcgccagagagcaatgggctgcatcgttggtggcaagacttatgctctgtgtttgcaacgaatgataagctggaagtcctgactatgaccaacagtgttttggggcctccttttttgaaggctctcgcggccgcactgaggcaccctcagtgcaaactgcaaaagctactgtgagtataacacaaatcccactggaaggaactttatggagatggtctgtttcccatccactttcttcattccctctccactcacactagacttccggaaagcacccatgtccagccttggacggaggtgcaggaggaatgagtcatggggtgcgtggtgaaggaaaccacacacgggagccaggctgacggctcgatctgtctctagttactgttagcttggtgcaaatgccattgcagtttttgccattagtgacatttgcaccaacttaatagctctgtgtccttaagtgaatggtgtacacagtgggtcacggaattcctgacatctccctggtgcacttcaatgcgcccatccataaaatgttcagcccggtgctgtggctcacgcctatttacttcagctcaggtgttcgagaccagtcccagctacttgggaggctgaggtgggaggatcacccgagcccaggaggcagaggttgcagtgatgttgagccatgatctggccactgcactccagcctgggtgacagagtgaggccctgtctcaaaacaaactataaataaataaaattaaatgatcatcacgacagagagatgaaatgcagtcccgcacgtgaagcccacaggaccgtacctgaagtggaatcagcacactgtgtaatccagggtgtggtggttactctctggagggacaccgccttacagaagccacgtgcgacctgagcactgagtatggttcaccgctgcattcctttgaagtattaatatgtactattatccccccccttttttaaaacagagtctcactttgttgtccaggctggagtgcagtggctggatctcagctcactgcaacctccccctccagggttcaagcaattctcctgcctcagcctcccgagtagctgggactacaggaatgcaccaccatgcctggctaatttttgtatttttagtagagatggggtttcaccatgttggtcaggctagttttgaactcctgacctcaagtgatctgccctcctcggcctcccaaggtgctgggattacagatgtgacccaccatgcccagcccccattttttagcaaagtgagagctggagaggttaagtgatttatctaagatcctgtggctgacaagccttaggtaaatcactccaaggcagacagccttaagctcgtcttccccaacactctgtgcttctctaacacaccactgttagcaggtgcctgcgtggggtaagcctcaccaaagagggcacatttgaactgggttgggaaggatgagatttacatggaagaggagaaacactacttcattttttttccaggtggggtcttgctctcttgcccaggctggagtacagtggcatgatcatggcttactgcaaccttgacctcctgagctcaagcaatcctcccacctcagcctctcgagtagctggggccacaggcatatcccaccattgcccggctaattttttttttaattttttgtagagacaaggtctccctaggttgcccaggctggctttgaactgctgatcttaagtgatccacctgtctcagcctcccaaaatgctgggattataggtgtgagccattgcaaccagccactattttttataatgtaagagtgagcgtgtatgcgttgcccaccgtctgctaggctatcttaggttctttgcacatgaatgctcttaaaactcatcccaagcagtaggtgtccctatttcacagatgagaaactgaggcatgagtttacatcattactaagcagtcaaatctggctctagaatcagttctcttagccaccactccatacgctatctctccagagtttttaagatccaaaaacccgataattcaccatgtgaaccactggccccttccttgaaataagccaccaggcatcacatggcccctggccattatcagatatattttctctcctattattgtgatagttattattcgctcctgcttactgagtgcgtactatgtgacaagcaatgggctgagaatttcatgggattaattctcacagccattctaaggagaaaatgtcgtatgctctcccttgtagacctgaaactaaactttagagaggttacgtgatttgtgaaagatggtgcgactagggatgttaagctgagaactcagttctgaattccatgttgcacagaacgggcccctccttatggactgactgaatgtagaagaaatagccggtcgggcgtggtggctcacgccggtaatcccagcgctttgggaagccaaggtgggcggattgcctgagctcaggagttcgtgaccagcctgggcaacacggtgaaaccctgtctctactaaaaatataacaattagcttggtgtggtggtgcacatctgtaatcccagctacttgggaggctgaggcaggagaattgcttgaacctgggaagcggaggttgcagtgagccgagattgcgccactgcactccagcctgggtaacaaagcaagactctgtctcaaaaaaaaaaaaaagaaaaaaagaactagttagccacctccgttgtggtgatggcatcacgaatatatgcatagtccaaactcatcaaattgtatatgttaaatatatgcaggttttttaatatcaaatcgattatacctcaaggaaactgtttttaaacaactaattagaaagaaagagattcagcagtgaacataagcattagaggtgcaaggcaaatctgtgtccctggttttagaaaaggcgtgtgatggccaggagtggtggcccatgactgtagtcccaacactttgggaggctgagccagtaggatcacttgaggccaggagtggaagagcagcctggacaacatagtgagaccccatatctacaaaaatttttctaaaaagaaagtagatcagaaagttgagctttgtaggccgggtgtggtggcttatgcctgtaatcccagcactttgggaggccaaggcaggcagatgacttgaggtcaggagttcaagaccagcctggccaacataataaaatcctgtctctattaaaaatacaaaaattagccaggcatggtagtgggtgcctgtagttccagctacttgggaggctgaggcaggagaatcacttgaacctgggaggcagaggttacagtaagctgagatcgcaccactgcactccagcctgcgcaacagagtgagactccatctcacaagaaaaaaaaaaagctaagctttgttattaaaataaagaaatataaataaaaattttaaaaccaaaagcatgattttaggagagtgcagggaaaaccagtcctccgaatccttcaggaataggatgacgttccctttgctttaagaaagcctttgtagacctcagtccaatcgaattctgatcctgtgagtcatttatttttttaaattttttttattatactttaagttctggggtacatgtgcagaacgtgcaggtttgttacataggtatacatgcgctgtggtggtttgctgcacccatcaactcatcatctacgttaggtatttctcctaatgctatccctcccctagccccccacccccccagaggccccggtatgtgatgttcccctccctgtgtccatgtgttctcattgttgaactcccacttatgagtgagaacatgcggtgtttggttttctgtgcttgtgttagtttgctgagaatgatggttccaacccaaatgcccatcaatgatagactggataaagaaaatgtagccattcattttgacttacagttttcccaggataggacctgaataatcacaggtttgtgtcactctttaatgtctgcatcctgaattcagttgtaaaccccctgagagtgggactgcacctgtcccacgtgcagcttccgggagcctcgtttgtgaggccacagaattctacgactgtggacgggaccctattccaaggagacgctcttccctctccagcctaaggcgtgtgaatagcaccatgttgaaccaggacttaatcggtgttttgacggggaaccagcatctgagatacttggaaatacaacatgtggaagtggagtccaaagctgtgaagcttctatgcagggtgctgagatccccccggtgccgtctgcagtgtctcaggtgagatttgagaggggggttagagtgggaaccggggtacccggatggtcttttcaagggcggtgatgagaggctcagtttccctctgtcctttcctttgatctgctgttggctttgttcaactttaaaagtacaatttgggccgggcgcggtggctcacgactgtaatcccagcactttgggaggctgaggcgggaggatcacgaggtagagaccaacctggccaacatggtgaaactccatctctactaaaaatacaaaaaattagccagcgtggtggcaggctaatctcagctactgtaattacgggctgtaatctcagctactcgggaggctgaggcaggataattgcttcagcccggtaggtggtggttgcagcaagccaagatcgtgccattgcactccagcctgagcgacagagggcgactctgtctaaaaacaataaaaataaaaagtgcaatttgaccatgctctagatccgtctgataccaggaaatctgagccccagctcctactggattgcaaaagctggatattttctaactttttattttaatttttgtgaatacatagtaggcatatatatttatggggtacgtaagatgttttggttcaggcatgcaatgtaaaataatcacatcttggagaatgggagatctagcccttcaaacatttatcctttgtattacaaacaattgatttatacttttagttattttggaatgtacaatttattattaactatagttcctctgttgtgctagcaaatactaggtcttattctttttcaacctgttaacccgtttatgcccgaggctgcaattttttgaattttttcaatcagagtttggtgatgaccttgagcagtgagatataaataactcccaagtgcttagcattccaataatggaatcctaggcataaatggttttaaccatcctgaccttcccctgctctccaccctcccactacccttcccagcccctggtaaccatcctcctactctctatgtccatgagttcaattgttttggtttttagatcccacaaataagtgagaacatgctgtttgtctttctgtgcctggcttatttcacttaacagaatggtctccagttccatccatgtcgttgcaaatgactgaatctcattctttttcatggctgaatggtactccattgtgtatatgtaccacattttctttatccatttgtctgttgatggacacttaggttgtttctgaatcttagctattgagagcagagctacagcaagcatggtagtgcaggcatctcttcgatggactgatttcctttctttggggtatataccagtggtggatggctggatcacatggcagcctgaaagagctgatttttcatcattcaggaatttcatgagccagttgttaaacaacgtttttaaaaattaaatcataggcttacaaatatattaaacaacaaaagtcatagattatcaaaatgcattgtttcctaatcattttatggttcattattatcactgctagggtgcagcaaactttttctatgacaagccaggtaagaaacacttctggcctctgggcccatgccatcatcatgatgactccattctgccactgcagtgctaaggctgccggagttcgtaggtaaacaaatggatacagctgtgttccaataaaactttatgaacactgaaacatgaatttaatataattttcatatgtcacaaaatattcgtttaataatttttttaaccatttaaaaatttttgtggcggctggacaccgtggctcatgcctgtaatcccagccctttgggaggctgaggtgggtggatcacctgaagttgagagttcgagaccagcctggccaacatggcaaaaccccgtctctacgaaaaatacaaaaattagctgggtgtggtggtgcgcacctataatcctagctactcaggaggccgaggcaggagaattgcttgaacccgggaggcggaggttgcagtgagccgagatcacgccattgcactccagcctgggcgacagagcaaaaactccatctcaaaaaataaaaataaaataggccaggcacggtggctcacgcctgtaatcccaacactttgggaggtcaaggtgggtggatcacctgaggtcaggagtttgagaccagcctggccaacatggtgaaaccctgtctctactaaaaatacaaaattagccagttgtggtggctcacacctgtaattccagctactcaggaggctaaggcaggagaatcgcttgaatccaggaagcagaggttgcagtgaggcaagatcataccattgcactccagcctgggcaacaagagcaggactctgtctcaaaaaataaataaataaaataaaataatgttttattagaaaacattcttggttgatatgctgtagaaaaccaagtggcactccagaggaggcccacgagccactgcttgccagctcctgaccactgccctggggctgccattgtctaccatacccatttggtggaaacatgatgtcatggtgcactactctgcacctcctcccactcctcgctcagtgacctcccactctgagctgaaaatcagccatggcagaggcatttacccaacaggcactggcaaacactgcacaccaggactccctcttccagaatggcagtggttagacatttactgccacacacctactcagactgtacttttttggtttgtttgtttatattcataggttttagggtacaggtgatttttggttacatggataaattctttagtggtgatttctaagactttagtgcacttgtcacccaagcagtgtacactgtaccccatgtgtagtcttttatccctcacctccttccaaccttcaccccaaccacaagtccccagagtctattacatcattcttatgcctttgcatcatcatagcttagctctcacctgtaaatgagaacatacgacgtttggttttccatccctgagttacttagaataatggcctccagctccatccaagttgctgcaaaagacatcatttcattcttttttcatggctgagtagtattccatggtgtgtctataccacattttccttacccactctttggtcaatgggtacttaagtgggttccatatctttgcaattgtgaattgtgctgctataaacatgcatgtgaaagtgtctttttcacataaagacttcttttcctctgtgtagatgcccagtagtgggattgctggatcgaatggtagttccacctttagttcagaccccactttccagcctttccatgtgcgaaccttctctcaacagaatttgtatgacctctcattttgttttcatctgccagcgttgctcctttacatccaacagagttgaatgtagcttggataatctccgcatttcattacctttcttgcacagaacagaaagctcaggtggctggaacctggaggtggtaagcacaatgcttcactgaatgtctttatataaacagcccaccttgaggccgaaatccagcccgagaagacagtggctgtgagactcaggaaaccttctctaacgtcactggatctcagttcttcaccttgatgatgactggcagataaatgcacaaagtgtgagttagacaggagaaataagcattgaggtctattgcacagcagggtgactataactaataataacctattatttcaaagttgctaatggagtagatttttaacattctcactacaaaaatgattaaattggtgagatgatggatgtattaattagcttgattgatgccttctataatatacacataaatgaaaatattacattggaccctataaatatacacaattatatttttccaactaactttttttaaaatttgtatttcaaggagctgaatggaaatagttagagctcagtcgttattgtattccagttgatgacagccccaagagtgtgttggtttttgctgatgacttgggaggaagttcctgagcttggtgcaggtgtgctggccggaaagttggaaataatcccccgagtctctgctgtgaagactgagacatgagacagtggaatccaggaggtcctacaggtaccattttccccagaaccatggctcagcatttgtatctggcttctacaggttggaagactgcttggccacccctagaatttggactgatcttggcaataatcttcaaggtaacgggcatctaaagactctcatactaagaaaaaactccctggagaactgtggggcgtattacctgtctgtggcccagctggagaggctgtcgtaagtctcctttctagtggctgtggttgtggttgtggttgtggtggttgtttggtagatttagtgcttctgtgagaaaagaagtcatagggaaggtacatgtataggagcaaacataagtcttgtgattgatgtaattatatagataggtcaataagggtccagccaagaatgaaagagaaataacatatctacataaaagtacggatttatacctaatattctatatcaagcataatgagtcctatgtatccatcatcccgtttatgaaatagaactcatcagttctgttttcgcctgtcctcactggttttattgaccctgcccccgaccccactgtgatgacatattgaatcaggttgatcaggctccttaatttatgtatagtattaatattactacccgtgtatccttaaacaggcatcacatcg[136 bp omitted]accccatctctactaaaaatacaaaaattagccaggtgtggtggcacgcacctataatcccagctactcgggaggctgaggtaggagaatcccttgaacccaggaggctagaggttgcagtgagccgagatcgcaccactgcactccagcctgaatgacagagtgagactcgtctcaaaaaaaaaaaaaaaaaaaaggattttacataaaagtatcacctgtgatgtgttttttccctgatctatatcttagtgttcatctgtttagttgcttctatagttaattcctcttcactacagaatgatattgatacgaagatccaagaatttagttattcattctactcacagttgagatttgggctgtttctaattgttggctacacacagacacacacacacacgcacacacacacactgtgatgaacattctaagaaaagaattgcagggccttggtgagtgttcatcttcagttttagtaggtttgtttccagagtgtacgaattggccagagcaatgggtatgaaggtgctcctaactccagatccctatccaagtcttactattatcagtattgttgttactgttattgccaatctgttgggcaggaaatggtaccttatggttttaatttgcatttccttgattactagcgactatttttttatcatctgactgttcatcttagtttatctgatttgcatgtcttcccatgtatttaatgcgtctttccttttttataacttccgaaattatgtctcttcctcagccgtctccttgtctgctatttattctttgatggtctctttctcttctctcttaatcccatatatttattttctatgttttaattttttttttttttttttgagacagaatcttgctctgttgcccaggctggagtgcagtggtgtgatcttggctcactgcaagctctgcctccctgcttcaagtgattctcctgcctgagccttctgagtagctgggattacaggtgcctgccaccgcactcagctgctttttgtatttttagtagacacggggttttgccacgttggccaggctggtcttgaactcctgacctcaggtgatccacctgcctcgacctcccaaagtgctgggattacagatgtgagccactgcacctagtctttttttttttcaggttttaatttttatttcaataagttttggggaaacaggtggtgtctggttacataaataagctttttcgtggtgatttctgggatttttgcacgcccaacatccgagcagtgtacactgtacccaatgtgtagtcttttatcccttgccaccccccaccctttcccccaagtccccaaagtccagtctgtcattcttatgcctttgtgtcctcatagcttagctcccacatatgagtgagaacatacgacgtttggtttccattcctgagttacttcacttagaaaaatagtctccaattctacctgggttactgcaaatgccattattttgttcctttttatggctgagtagtattccatggtgtgtgtgtgtgtgtgtatgtgtgtgtgtgtgtgtgtgtgtgtgtgtgacattttctttatccacttgttgttttatgggcatttgggctggttccatattttcgcaactgcaaattgtgctgctataaacatgtgtgtgtaagtatctttttcatataatgacttcttttcctctgggtgaattcccagtagtgggatcgctgcatcaaatggtcactctacttttagttctttaaggaatctccacactgttttccacagtggctgtactagtttacatttccatcaacagtgtaaaagtgttcctttttcaccaacacctttctttttattgtttgattatagccattcttgcaggagtgaggtggtattgcattgaggtttcaatttgcagttccctgatacttagtcatgtcaagcatttttccatttgctttttggccatttgtgtatcttttaggaattgtctattcgtgtccttagcccactttttgatgggatttttttttcttgctgatttgttctttgtagattctgaatattagtcctttgtcagatgtatagattgtaaagattttctcccactctgtgggctgtctgttaactctgctgattatttcttttgctgtgcagaagctttttagtctatcagttttattgatccacaatgccttcatcccaccattcccacatcgaagctgctgtcctttccttgaaagcttggaagtcctgagtggtgatgacagaggtgtgaggatgcttctgcatccagagggagagccctgactgagaagatcacccttctgtgtgagacaaagacccctctccattcagtcatctgtgtgcttctctcccataggatagagaactgcaaccttacacagcttacttgtgaaagccttgcctcctgtctcaggcagagtaagatgctgacccacctgagcttggcagaaaacgccttgaaagatgaaggggccaagcatatttggaatgccctgccacacctgagatgtcctctgcagaggctggtgtaagtcccagaatgttttcttctctgaattccctggagcagaacagggtgatgaagagaacctgttatatattcatttatgtcacatatttattaagtgcctactgcgtgttaggcatggtgctagcactgaggggaaaagcacaataaagaggagggttattatttctgattcagggacaagtgatctagaggcagagttctcaaactgtgtaccaagacacccaggagtgaactcagaaggactgcagggtattttaaatttaaggaatattgagatctatctgttcatcactgtaagaacgactacctcgaggtgtaagaattaaagaaagaggaaagaaacacaaaaggtggcttgacagttaaggacaggtttattttagagaaaacagacctgagaggggcttctggccgagttaggtcagagctacactctcttatagactaagagtttttaaagattcagggtgggaatatttatcagaggcttggactgcttctgtgactcttggttgtgcttatctgggagggagagttgtgtgtctgttcccatacatccttctgcagctgcaggcatatcccctgagtctgcttttagcttccctatcttagtgcacctgaagggaaaggaatgtgctattaaggctcactgttttgggaggcctgtaatcccagcac[133 bp omitted]gaggcaggagaatggcatgaacccgggaggcagagcttacagtgagccaagatcgcaccactgcactccagcctgggcgacagagtgagactctgtctcaaaaaaaaaaaaaaagaaagaaaaaaggcccattgttttactggggctcgtggcatgaatgtgaagtttggcagttacccgagagactttccccccacctccctctgtgccctagctgtcttatctgtgttttactgtctgttctttctggctgcttgtaattaggagagaaatgatttccttgaaatgcatgaggttagaaagggagctggaacttaaagtgccagtgtctgtccgagatcacggtgctcctgctctgtcacgaggtagttcattttcacagcttgaaatcagccatggcagaagtgtttgcaccatggaaactggcaatcactacacatgagggcttttgtttgtttgctctagagagctggtttactaggacatcaccgaaccataaccatcgaatcccctctttatttcttgtctcacatgagaatatgagctgctaaaaggcaggggctctgcctgcgtgaattcccatcccctaattcaatgccccaagcatagtaactctcagcaaatgtttgtgaaaggcaagaggtggcgcaaaataccccctgaaacactgatactgttagttctccaaaaagaagcagggaacggtgccactgctttggaaagcagctttggcagttcctcaaaaggtgaagcacagacttaatccgtgagccatcagtcctgctagtaggtgtatccacaaaagaaataaaaacccacctccacatgaaaacctgcacacagttcacagcagcattattcatagtactcataatacccaagacctggaaacaacctgtgtctgtgccctgatgacggcataaaggcagtatggtgtattcacgcaatggaatgttatttaattgttaaatgaaatactgattcatgctacagcatggacgaatcttcaaaatattatggtagataaaagaagctaaacgcaaaaagtcacatattacatgattccatttaaatgacatgccaaaaataggcaaatccagaaaaagaaagcaaattagtggtgttagggttggggtgggttgggggaggaagtgagaagtggcttctaaagtatccagggttttccttaggggtgacaaaaatattccaaaccgaacttacacaaatattctaaaattgtggtgatgatcatacaactttataaatagactgaaaaccaatatttggtacactttaagtgggtgaattgtgtgatatattaattgcatcttggttatgccattatgcaaaaacaaaaaacaaacaaacaaaacaaacaaataaaaacagaacccaaaaacaaagaagtaaaacctaagggtgttttcgttgttgttgttgttgttgttttgttgtagttgttgttgttgttgtttttaacctgtgtttctttgcagactgagaaagtgtgacttgacctttaattgctgtcaggatatgatctctgcgctctgtaaaaataaaaccctgaaaagtcttgacctaagttttaatagcctgaaggatgatggggtgatcctgctgtgtgaggccctgaagaaccctgactgtacattacagatcctggagtaagtggcccctcgtctcctcctgtgagaccaggagaattgtatataagcgtctctcaggatggaatatataacaggaaagggctgtctttttaagtttctggattgttccctccattgaattggagaactgggaagcttctgagccgtggttctcaaagtgtggatcagcagcagtttcgcctgggcaggacacacacaaattttggggccccacttcggacctagggaaccagaaactctgagggtgggatgcagcaatctgtgttaacaattgttttaaaaaatattcttccagttgaataaaagataacaaagagtttgtcacttttagactgatatctgagatgactggtctgaaattgaattttacacttaggagatatatatatacacatatatgtatataaagatacatatataaatatatatgtatataaagatgtatctaaagatacatatatatgcatatatatgtatataaagatacatgtggccaggcgcggtggctcacgcctataatcccagcactttgggaggctgaggtggggcggatcatgagatcaggagatcgagactatcctggctaacacggtgaaaccatgtctgtactaaaaatacaaaaaattagctgggcgtggtggtgggcgcctctagtcccagctaatcgggaggctgaggcaggagaatggtgtgaacctgggaagtggagcttgcagtgagccgagatcacaccactgtactccagcctgggccacagagtgagactctgtctcaaaaaaaaaaaaagatacatatatacatatatatgtatataaagatacataagatacatatatacgtatatacgtatataaagatacataagatacatatatacatatatacgtatataaagatacataagatacatatatatatatatgtatataaagatacataagatatctgcatatgtgtacacatatatgtacagacacatatatacttattttataaatatttatatgtagatacttattttatatattatacatataagcaatatattatttatatataagtatatataaatatataaaataaatacgaatatattatatgtaaatatatgtaaatatacaatatattatacattatatacttacatattatgttgtatattatatatttatatatacataatttatattatataaatatatgtattatatatttatatataatattaaaatatatattaattatattaatatatttatatatgaaaatatataatgtatatatttccctgttttttgtggtctctttgctaacatgtataccagccagtgatataaaagcattcgttctgtttttaattctttggttaccttaagtatttggaaaagacttgtaaacatctcctctcatgatcaaaaaatgaatctaattttacctctttcaatccaaattttttgctctccattagcatagtcttggtatttaatctagctcatttaaattattgtcttgtagaacatctttcatttccaggattagtttggataatggtgttcatttttgttgatgatttgcttctcaaatgaaattcagtatgaattcactgccagtcatgattctttgatgcctcaaatctagtttgggttttaaatgttgatttatctcttagattgagtgaaatatattttcaggtagaaaagaactttctacacttgaaagtgtttatgcagtattttctaagcctttgcttgtatgagattattattatttttttcagatcacaaaattaattttatgtttccagtatacctgtggggctaacaagacagttatctgctttgggtccttttcatccacctgtcccctttgggtttgctgtttaatttaattttttttaaatttttttattatactttaagttttagaggggggagggatagcatttggagatatacgtaatgttaaatggcgagttactgagattattttttaatctagttttggtcatgagcagtaacttggctcagtgtaaaattcatggaccctatctgtcttagtctgttttctgctgcttataacagaatacctgaaattgcatgacgtataaagaaaaggactgtggaggctgagaagtccaaggtggaggggctgcatctggtgagagccttagtgctggggggattctctgcagggtcactagtgagtcactgagcatgctgtatactggctcagatctctttccctcttcttatacagccactcatcccactcccatgataacccgttaacccattaatctaataatccatgaattttactctttgttcaaggactcttatgggccggcatcgtatttatgatacacggcacctctttgagacatggtcacttatttgtagatgtgcctccccaacttttcagtgagtactgtgtgggagggcaaagtgacttacttatagaaggatttgagctgggtgtggtggcatgtgcctacagtcccagctgctagggaggctactaggtagtaggattgcttgagccaaggaatttgaagctacagtgagtcagggtcacaccactgcactccagcctgggcaacagagtgagactcagtctccaaaaaaaatttttttttaaaaagatccaaacacctggcccattaggacaataaaaccatgctatttgaatacatgtattttgttacctgtctcctccctcaataccctgcccagtcaactgtgagttacaggaaggcaaggatggtgtgtgttgctcactcttgtgtcaaaaatgtccactaggtagaatcaaatatcttttgaatgaatgaagataagtaggtacaagccattttcgaaagatatacttggctcataaattcttagagtgaggaatactatagcctgctctgaaatcaccaaaaggacacaaagaaactgattgactataggtgaatagaccatagttggaacaacattacacattcctgtcagtgtgatttcttggctgtaagccgtcacaccggctgagctctcagatgagttgtgatgacttctctgctgtctgctgtctgtttctgtgtcacaggctggaaaactgcctgttcacctccatctgctgccaggccatggcttccatgctccgcaaaaaccaacatctgagacatctggacttgagcaagaatgcgattggagtctatggtattctgaccttgtgcgaggccttctcaagccaaaagaagagagaagaggtcattttgtaagtctccaccgggtttcctgtgcaaaacctaccacacaagagaagctccttgtaaaacgtgagatgctgggctgggtgtagtggtgcatgcctgtaatcccagcactttgggagactgagacaggcagatcgcttgagtctggagttcagaccagcctgggcaacattgcaaaaccctgtcttctactaaaaaatagaaaaattaactaggcatggtggtgcatgcctgtagtcccagctactcaggaggctgaggtgagaggatcacttgggcccaggaggttgaggctacagtgagccatgatcacaccactgcactccagcctgggcaacagagtgagaccctgtctcttaaaatagaaagtgagattgtggacctggaatgctattgtttcaggtgttgctaccattctgcttttgtttcctggggatttatatttcccttaatgtagctgttcaaacccccaactcccacttttacctaaaggaaccattaactgggattctcctatctgatatcttctttcttgtctttgtcttctcttttcttcatttcttcaccttttcttcctgaacagctgagtttgttatcacttaccagctatatagccatgaacaagttaatctttctaagcctcaatttgctaatctataaaattgggatggtgtcttctcccatggagattttataatgactgaaagaaaagtcgcacatacggcacttaacacagtgcctaacacatgttctcaaccagtggtgggttctgggtgaaagatacaatttttcctggtgtatgagttgtctattgctatgcagtgaattacctcaacgcttagtaacttaaagccacataaaggcgtattgtcttacacaatttctgagggtcagaaatacgacagcgatgtaactgggaggttctagctcatggtatctcccgaggtctcagttgagccactggctggggtttgatgagggctgttgaatctgcttccaggctcacttgtgtggctgtgggcggcgggggggcctcagttgttctccagggagttgctcatgacattgcagctggcttcctccagaacgagaggctgagagaggcagaggcagagggagatggtggcagagagagatgactgacagctcaaaacagagccacagtcttttattacttaatcttgaaagtggcgtcccatcacgtctgccttgttttattggccatggtccagccctggtccagtgagagagggagccatccaagggtgtgatttgtaggaggagggatcatgggggctgtcttggttgaaccccaaggcactttgaattcattcctgagctcctaagagtgctcctatttgtcttgacctactgcatggggccatggtggtctcctaggtggtaaatttctgttctagaggttctgtctctttgttttggggctgcaaaagaaaaccaaatgtaagaaaacaaaaccttgtttttatccttcccagggagaagaaagacagcaatgaagtggatatgctggcaagactggagggccctgtagtggaaggagacttcctgaagataatacaggactggaattcttagtgctgtgatgaagcaatagagatgaatcgatctggaccctctggtgactgatctggtggccctctgggtattttttttttttcctaatgagaaattgggaaacagttgcctattttgtgggccgtcctgactctggaatggctccattcgttctgggaactggtgtagggcatgacctccaaatagctccatcaatgttatggagtgtcatgtgttaacacatagattagtcactgcattgggggcaccaaggtaaggtgagttccaacccacatctactcctggctaccagaatgtctttgaatatgtcatgtaaacatctcttggagatatgtcttcatatcttcaagggtattagaaaaatttaattaaaaatatgcatgaatgcaatttgaaattttttagagtgtgatttatttaccaatagactggtccatcaactgttaaggaagaaacctgttcttaacgtgtctggggaaagtgtgcacaaggaacttctaaggaagataataaatgtagcaagtactggaaaaaggaaatcacctcatgtttaaggagctctaaaaatgaagtgtaactcttaactttttaaggtcctaactaactactacattcttaaattagttatggcagcatttaaaactcaaagatctagaaagcaatcacaatgttttttttccccttctgaaacagccatctttttacaatgtaatgatcaggtatcatccaggttggtttctcttgttttttgtttttttttttgagatggagtctcactctgtcaccacactggagtgcagtggtgtaatctcggctcactgcaacctccacctcctagcttcaagtgattctcctgcctcagcctcctgagtaactgggactacaggtgtgcaccaccactcccagctaatttttttgtatttttagcagagacagggtttcaccacgttggccaggatggtcttgatctcttgacctcgtgatttgcctgccttggcctcccaaagtgctgggattacaagtgtgagccactatgcccggcccaggttgatttcttaattctgaagaaattttatttcaaaagccagagcagttggggtcttcaacctccaccctagcaatcccactgctaggtatataccccaaagaaatcagtaaatcagagagatatctgcacttccatgtttattgcagcactattcacaatagccaagatttggaagcacctaagtgtccatcaacagatgaatggataaagaaaatgtggtacttacgcacaatggagtactattcagccatgaaaaagaaacttaagtgtagaaacaatggtatcatagaaacagcacactggtgctcaggtattgttttctaagtaccgttcctcattaaaggaaccaagaatcttcagagaaagagctgactccacagttggtgctgggaatgtacagaatgggcttggaacatcttgtgccagaagtaagacaatgctcagagaacaatgggggccaggccagtggcttgcacctgtaatctcagcactgtgggaggttaaggtggagagttgcttgagcccaagagttagtgaccagcctgggcaacatagggagtccccatctacattaaaaaatgttttacaaatcacctgggcatgatggcgcatgcctgtggtcccagctatttggggggctgaagtgggaagatcacttgagcccagaatctcaaggctgcagtgagccatgatgcatcactgcactccagcctgggcaacagagtgagaccctgtctctgaaaaataataataataatggggacatagcaataggaacaaggagcctgattgaatgagttcccaccggccaaatctggaataatttaatgatcaaaccaaataatggtagaaatgtggatgacagtcgtgagaccttggttcttgtcttcatttaaaagaatttaaacaacagatacacagcaaaggagatgcagcatagggcaattgcaaaagaaaaagaatattttgaaagtaggccaggtgcggtggctcactcctgtaatcccagcattttgggaagctgaggcaggtggatcatctgaggtcaggagttcgagaccagcatggccaacgtggtaaaaccccatctctactaaaaatacaaaaattagccgggcgtggtggtgcatgcctgtagtcacaggtacttgggaggctgaggcaggagaatcacttgaacccaggaggtggaggttgcagtgagccaagattttgccactgcactacagcctgggtgacagaatgagactccatctcaaaaaaaaaaaaaaaaaaaaagcaaataaatgaaagacgaaatgtggtggtagagaaaccatcagaaggtgctgaaaccagtagatggagactcgatgtactcacatgagtctttaaggttctccccagaaactacatgtgaattacaaagtaagagtagtgggaaaacagggtagattgtgccttagccaagtactcaaagttaacatcaccaataagaagacaaatggatatcatgtgcctgtggatggaacgtgctgagataaacacagcagggcctcagtgacatgacagaacaagaacacaaagttggcaggaactatttcagattcaggaagaccaacctagtagatgcaaaaaaaaaaaaaaaaaaaaaaaaagataaaattcaacatcaatttgcaatttttaaaaaacacttggcaaacttggaaccgatggtgacttatttaatttgaggaagggcttctaaaaaattactgctaacatgcttattgttaatttaatctaatatttcactatttgtgaaaattctttccctaagataaaaatgagagcaaaaaacccaaccactattacaacttttatttaactttgcactggaggtcctagtcagtgtaacagggcaacaagaggaataataaacacaacattataaagatggaaataaaactgtcatttttcacaaacaatgtgattacatacatagaacaagaactgataatcctggtaaaccctggggattaaaaaataataattaaaaagtgaattagtaagatcccacacacaacaactcgatatatgaaaataaaatgtattactatgtactattaagcagtttttaaaagcataaaatttcttttatactggtgtcaataatctcaaataggaataaacaataacagttgtggccgggcgcagtggctcacgcctgtaatcacagcactttgggaggccgaagcggggggatcacctgaggtcaggaatttgagaccggcctggccaacatggagaaaccccgtctctactaaaaatacaaaattagccaggcgtggtggtgcatgcctgtggtcccagctacttttgaggctgaggcaggagaatcccttaaacctaggaggtggaggttgtgttgagccgagatcgcgccattgcactccagcctgggcaacaaaagcaaaacactgtctccaaaaaaaaaaaaaaaaaaacaacagttgtgccatggccaggcccagtggctcacgcctgtaatcccacccctttgggaggccaagtggggaggatcacttcagcccaggagttcgaggctgcagtaagccgtgcttgcaccactgcactccagcctgggcaacagagtgagaccctatctcaaaagaaaaaattaaagaatacctaataaatggagaaatatacaaacttcatgaatgggaacactgtctttcaaagatgacaattttccttggctgtatgcataaagttattgcaattaccataaaattcccaaagtactctagtggaaatttacaagcaaattctaaagtatatgaagaaatgtggccaagcgcggtggctcacgcctgtcatcccaacactttgggaggcccaggtgggcggatcacaaggtcaggagttcgagaccagcctgaccaatatggtgaaaccccgtctctactaaagatacaaaaaattagccaggcgtggtggcgggcgcctgtaatcccagctactagggaggttgaggcaggagaatcgcttgaactggggaggcggaggttgcagtgagctgagatcatgccattgcactccagcccaggtgacagtgtgagactctgtctcaaaaaaataaaaatgaaaaagaaaaaaaagaaatgcaaagagttcaggataactagcacagtatggtattttccatacatgtaattagagattggagaaatatactagggaaacagaatagagtccagaacagaagggcataaacatgatcacgtgacttctgacaagctgacattacaaaagactagggaaagggtagtattgtaacaaatggtgctaaattgattgttcctacatagaagaaaaaatctgaattcctacctcataccatatacaaaattaattccaagtatagtataaatctaaatatgaaaggaaagacactacactttctaaaaactaatcagaagaccttcatgacctaaggagagaccataaattttaaaatgcattcaccataa[144 bp omitted]tctattaaaaatctgaaaattagccgggcatggtggtacacacctgtagtcccagcttctcaggaggctgaggcaggagaattctttgaacccaggaggtggagtttgcactgagtactccagcctgggtcacagagcaagactccacatcaaaaaaaactaaaaataaatacatgggactttatcaaaagtataaacttctgtttcaagattactaagagagtacatttcaagtgttctcaccacaaaaaaataagtattcaaggcaatggatgtgtttgttagcttgatttaatcatttgacattgtatacatagaagatcacaccggaccccaggaaaatatacaattataatttgtcaatacacaaaaaattaaaaaatgccaagtgcaacttccagattatgtaaaataagggcacccaacacacactcacactcacacacacactctatcatacacagtctctcacacacacacactctctgtctcacacacattgtctcacacccactcacacagtctcacacacattctctcacacacatacacactgtctctgtctcacacattctctctctcacacacacatgcactctctctctcacacacacactctctcacatacacacacacacacacacacacacacacacacacactaattgcttcaggacagccagctgaaggctgtgagcatccgggcgccctcagcacaggtgtgtggtggtaaaggcagcctcttgccagcagcagcacctgtaagtggtgcacacaggtgcagaaaagtgcctgttccctggggctggtggttcagagccggttgcagccaatgagcagcagcaacatcactggctcagcgctccccaggaactatcgccacgtgggcgtggagctgggcgtggccttcttttttccgtgattgccagctggcccagagctggacctgctcttggtggtgaggtgtgaagctggtgagtattcctcctgtcttgctctctgcccttcccgcttttgttctccactgctgattagaacccgcgtattgagcttactaggtgcccccaccctctcccttctggctgctcaaagcccaggaccaaaggattccttgaaagaacaaagtccagttaccccattttgctgaaaagatcttcctctaaaacctcatatttacttggggtatttaggtaagtctctcgtccttttcagacattcggtctaaaatactgtacagagggctgggtgcagtggctcacgcctataatcccagcactttgggaggccgaggcaggtggatcatctgaggtcaggagttcaagaccagcctggccaacatggtgaaatcctcatctctaataaaagtacaaaaatgagctgggcgtggtggcatgtgcctataatcccaccttctagggaggctgagacgggagaatcgctttaacccaggaggcagaggttgcagtgagccaaggtcacgccactgcactccagcgtgggtgacagagtgagacttcgtctcaagtaaaaattaagtacagagtagggggtactgcaacttgaatgtcaggattagctaatgtctggtctgcatttggtaggagtccagagggtgttttggtgctaattgtgcaaatactatggttaaccgtaacttagttattgaaatgccatacaattctgacggtgttgtttgtcctgtttaccaagggaggaagctgagccccagataagttaaatggcttgcctggggtagaaagcagcaaatcattcaaagctgggtctgagacttcaagccctataatcttaactgctgctttctaatcattcaggacacctgggtagaaaggtgaggtgggaggggtacggtctgtagaaaaagcatagagacaaaatgcaagcttagggaagtcactcatcctcagaaaataacctcaaccagcagccttcctttacctccctccagctgtattcctgcctggactcgaataactagcttctccccaactcctcacccacccgacttcacgggaaaaagtgactgcctatcccagattaatccttaggccgtccagtcatctttctctggggcttgattgatcagttcccactctgacaactggcaaataccaggcgttatcatcctgtatgcattaacgtactttcccctgaaacagagcaacccagtcaacaccacagaacctcagctttgaaccctggagtgaggacggtgatgccctgtgtgtattaatatgctatgtaaggctgggcgtggtggctcacgcctgtaacccagcactatgggaggtcgaggtgggcagattacctgaggtcaggagttccagaccagcctggccaacatggtgaaaccccgcctctactaaaaaaaaaaatacaaaaaattaggcgtggtggtgggctcctgtaatcccagctgctcgggaggctgaggcaggagaatcacttgaatctaggaggcagagtttgcagtgagctgagatcacgccattgcactccagcctgggcgacagagcaagactctgtctcaagaagaaaaaaaaaatacatatacacataaatatatatatgtgtgtgtgtatatatatatatatatatatatatgctatataaagtttaaatgaaatgctttgagtcacctaagacaggatatagacaaagtcttcatcgtcttcttgcttcttctacctttatttattctcagctctgaatgtatgaacctgctcaatcacctcatcttaaaaataaaatcactgtccctagaccatactcgtttccttacccacccctgaggcttttgttggtttttacagccctggttcacgtcttggtcctccagcccctttaaaggattgtgtagagcggtaagggaaatgtttaattcaaattacgtgtatatagaagtgtttagatatgacagtccgaaattcgttctttctcaaataaccttccttcttaatttcattgcctaagttgagagtctttgtcttctgtgttttgctttcaatttccatgtatccaggtggtttatgttaactcagaagggggagaaaaacctagaaaatcttaattgttctgtggtcaggatgtaagcttttaaacatgtgctcagaaataagtatttttccatttaccaatagtcaatattgtccctaaatatttataggaatgtgtagaaaagcttattttcttgctatggttctattttgagcaatacagcacataaacttcaatgttctatcatcagtgttcacgtgtacctagttttttggtcttccatggatgggtaattgtaagaatacctcaattgttttgatgaaattcatttatgtctacttatcttctactaaaatgattttttaatgggaggtactttttagtatttggtgatttttggtgtgtatgtgttagacaaagtctccctcttttgcccaggctgtagtgcaatggctggatctctactcactgcaccctccgcctcccaggttcaagcaattctgcctcagcctcccgagtagctgggattacaggtgcccgccaccacgcccggctaattttcatatttttagtagagacggggtttccccatgttggccgggctggtctcgaactcctgacctcagatgatccacccacctcagcctcccaaagttctgggatgacaggcgtgagccactgcgcccggcctttttcagtattaatttgaaagagcagcaatatgagaaggtgtggcgggaagtgtgtccttccctgcccccgtagtgtctcttccctattttctgctcatcacccaaagacattctgcgcacgtgtatggcattaagagccttacagatggggcaactttctgtgctgattgttgtgcatttttaaggatgcagggcacgttggtgctcaaattaacccacctgtttttaatcgactcctaaatggtcttcagtcttgctgttttacacacggctgggtctaattgcatttaaaacggataaagattgttaaagtaccgtccaaaaagatggcacccatttacacttcactaatgtaggagcaccttttccttcacccatcacaaagcagcgtccagtcacacattgtggacattgtcagcctcacatgtcaaacgtagtacatcattttggctatttaccttatcagtaataacttttt[132 bp omitted]tgcaacctctgcctcccgggttcaagcgattctcctgcctcagcctcccgagtagctgggactacaggcacacgccacgatgcccggctaatttgtgtatttttagtagagatgcggtttcaccatgttgaccaggctagtctcgaactcctgacctcaggtgatccacctgcctcaggatcccaaagtgctgggattacaaaagtcatatgcagttttttaactcttcaaaatccttctaataggctgggcacagtggctcatgcctataatcccagcacttggggaggccgaggcaggtggatcatttgaggtcaggggtttgagaccagcctgactaacatggcgaaataccctgtctactaaaaatacaaaaattaggccgggcacggtg[167 bp omitted]gaggcaggagaatggcaggaacccgggaggcggagctggcagtgagccgagatggtgccactgcattccagcctgggcgacggagcaagactctgtctcaaaaagaaaaaaagctgggcatggttgagggtgtctgtaatcccagctactggggaggttgaggcaggagaatcacttgaacccaggagacggagattgcagtgaactgagatcatatcactgtactctagcctgggcaacaaaagcaaaactccatctcaaagaaaaaaaaaattccgctgagctgttgatcattatcatggattggaagagctgtttacgtaatgcattctttgtcatgtctcaaatttatttgcagcagttttttcagcgggactttaaagatttgtttgtttttctggagtgaggagggtactgtattgaattaatctgtcatcttgtctcttttataccattcgattgagaccttctattccatttgctcattatttgggggctaaatgtaaagtaggaattcatgaacataaatatttcaaaatttagcccccggaaatggtgaccttctatcgtagatgttaaagtgcagcctagacatcaacagagtgaatatcattcttcttagaattttcttgtctagttttggcttttcatagaaacattgagtttcttgtcctgataacaatatcagcagtacttcttggatgatattatactgatggaggatgactgatgtgttgggaatctgcctctgcctcaccacattgagccttttatctagcagccgcattttaaagctctcaaaacagatagccacttttctaaattatgcatgttttacctctatagttgctgttcatttgatctcacgtttaactggttattagattttgtgtgggatttcatcgttacatttgttaccagcccaatttaataactacatataatttaaaattgagtaatttattaggcatacatacctacatacagatgttaattttcacctttttccacttttatacctcctctttatctgattgctttcctatcaaatataaattaggtaaatataaataatagtggaatatcagatataaagaatagggagagagtacaaaactgaacggaagtgctgacagctaacattctttttttactttttagttttgggggtacatgtgaaggtttgttacgtaggtaaacttgtgtcatgggggtttgttatacatactatttcctcacccaggttattaagcccagtacccagtcgttatttctttctgcttctcaccctcctcccaccctccaccctcaggtagaccccagtatctgtggttcccctctttgtgtccatgtgttcttatttagctcccatttataagtgagaacatgtggtagttggttttctgttcctgtcttagtttgcttaggatgatggcccccagttccatccatgttcccacaaaagacatgatctcattcttttttatggctgcatagtattccatggtgtacgtgtaccacattttctttatccagtctgtccttgatgggcatttaggttgactccatgtcttttctattgtaaacagtgccacggtgaacatttgcatgcatgtatctttatgggagaatgctttatattcctcttagtgtatatacccagtgatgggatggctgggtccaacgctactgcttttagctctttgaggaatctccaccctgctttccacaatagctgaactgatttacactcccaccaacagtgtataagctttccattttttcctgcaacctcagcagcgtcggttttttgactttttaataatgacacgtaacattcttatgggattctctgtagggcttgtgtcaaatccagcccattgcccagttttgtaaataaagatttattggaacacagcttttctcctttgttgacaaattgtctacagctactttcccagtgcaggagcagctaagcacgggtggcagagagcaaatggccccaaagccaaaaatgcctggctccttctgggagatttgctgacccctgatctttgtcaaaaatagatacatttgctgcagtttttcctttattttagttgacacataactgtacatatttatggagactttttttttttgaaatgaattttcgctcttgttgcccaggctggagtgcaatggtgcaatcttggctcactgcaacctctgcctcccaggttcaagcgattctcctgcctcagcctcttgagtagctgggattacgggcacctgccaccatgcctggctaattttgtatttttagtagagatggggtttct[131 bp omitted]gtatcatgatcaaatcaggggacttagcatattcatcaccccaaacatttgtgttgtgaacactctgtcctcccttctagctttttgagagtggacaataagttatagttcaccatattcacctgcagtgctgcagaacacctgcacccatttctcccttctacctgtaatcttagcacccatgagccatactctccccctcctctccccctcctctccccctcctctccccctcctctccccctcctctccccctcctctccccctcctctcccccctctctcccccctctctcccccctccctccccctctcccccctcccctcctctcccccctcccctcccccctcccctccccccctcccctccccctccccctccccctccccctcctctcccctcctctcctcccccctcctcctctcaacctcccctctcccctctccctcctctcccctatcctctaatacccacaattacatcccctacttccatagtcccatttgctcaatttaactcccacatatgagtaaaatacattcagtatttagtttcccatgcctggtttattttgcttcacacaatgaactacaggctgtagctcacatgaagagctacaggctcatctgtgttgtcacaaatggcaggattttttgaaggctgaaacatgttcccttgtgtgtgtataccacgttttcttgattcatttgttgatggacagttaggtagattacatatcttagctatcgtgaatagtggggtggtaaacatgagagtgcagacatacctttgatatacttcgggtaaatcaccagatcgctggatcatagggtattaatctattttcagttctttgagacactgctacactgttttccataatggctgtgctaatttacatttccactgacagtggaaaggagtttctttctctgcatccttgccagcatttatttttcgtcttttttgatagtagccattccaactagagggaaatgcaaatcaaaaccacagtgagattgcgatgatgagtaatgttgaatcttttttcgtatctgttggtcatttggatgtcttttgagaaatgtctgttcaggtttttacccacttcttaaatggattacttggagttttgctatacagttgtttgagttcctcatatattctgggtattagttccttgccagatcattattttgcaaatattttctcccattctgcggggtttttttgggaggggggacagagtcttgttctgtcaccaggctggagtgcagtggcaccatctcagctcactgtaacctccaactccctagttcaagcgattctcctgcctcagcctccccagtagctgggatttcaggcacgtgccaccacacccagctaatttttgtatttctagtagagatggagtttcaccatgttggccaggatggtctcgatctcctgacctcatgatccacctgccttggcctcccaaagtgctggagttacaggcctgagccactgtgcccagccaggttgtctctttactcttggactatttcctttgctgtacagaagctctttagttggatgtactcctattggtctatttttgcttttgttgcctgtccttttgaagtcttagccgcaaaatatttgccttgacttgtattcagaagagctttccctatgttttcttctggtagttttattatttcaagtcttatgtttaagtactttatcttgagttgatttttatatatggtgagagacaggggtctagtttaattctgcatatggttatcccgttttcgcagtaccacctagtgaacacagtgtactttccctaatcttggtgcctttgaaaatgagttggatgagttcatgctctttgtagggacatggatgaagctggaaactatcattctgagcaaactatcgcaaggacagaaaaccaaacaccacatgttctcactcataggtgggaattgaacaatgagaacacttggacacagggtggggaacatcacacactggggcctgtcctagggtgtggggctgggggagggatagcattaggagaaatacctaatgcaaacgatgagttcatgggtgcagcaaaccaacatggcacatgtatacctgtgtaacaaacctgcacgttgtgcacatgtaccctagaacttaaagtattaaaaaaacttaaatattaaaatattctaacaagtcctgaaaaatacattaaaaaagaaagagttggctataaatatatggatttctgaattatctattctgttggtctatgtctgttttcatgacagtgccatgctgttttggttactatagctttgtgaagtcaggtaatatgcctccagctttctttttgctcaaaattgtttgggctacttgggatcttttgtggttctatacaaatattaggattgtttttctatttctgtgaagaatgtcgttggtgttttgatagggattgcattgaatctgtagattgttttgggtaggatggccattttaacaacattcttctaatcagtgaacgttagatgtctccatttttatctatcctcttcaatttttttcagtattctgtgggttttactatagatatttcttacctccttagttaaatttatttctaggtacatttttgtagctattataaaggacattgctttctttttcagctagttcattattggtgtttagaaatgctactgtttttatgttgatttttgcatcatactgagttcatttattatataaaaacttgcatcatactgaaaaatttatccaaaaatcaacatttttgtatgttgattctgcaactttactgaattcctttatcagttctctgtcttttggtggggtctgtaggcttttctaaatgaaagattatattgcctgcaaacatgaacaatctacttcttctccaattttgatgccctttgtttctttttcttccctaattgctctggctaagacttccagtactgtgttaaataggagtggcggaagtgggcaccctgtgtgccagttcttagggaaaaggctttcttcttttccacattcagtataatgctagctgtgggtttgtcatacatggcctttattgttctgagttatgtttcttctgcgtcttatcataaagggatgttgaatttttttttctttgttcatcttttcttttatactttaagttctagggtacatgtgcacaacgtgcaggtttgttacatatgtatacatgtgccctgttggtgtgctgcacccattaactcatcatttacattaggtatatctcctaatgctccctcccccacaacagtccccggtgtgtgacgttccccttcctgtgttcaagtgttctcattgttcagttcccacctatgagtgagaacatgtggtgtttggtttttcgtccttgcgatagtttgctcagaatgatgatttccagcttcatccatgtccctacaaggacatgaaatcatccttgtttatggctgcatagtattccatggtgtatatgtaccacattttcttaatccagtctatcactgatggacatttgggttggttccaagtctttgctattgtgaatagtgccacaataaacatacgtgtgcatgtgtctttatagcaacatgatttataatcctttaggtatatacccagtaatgagatggctggatcaaatggtatttctagttctagatccctgaggaatcgccacactgacttccacaatggttgaactagtttacagtcccaccaacagcgtaaaagtgtttctatttctccacatcctctctagcacctgttgtttcctgactttttaatgatcaccattctaactggtgtgggatggtatctcattgtggttttgatttgcatttctctgatggccagtgatgatgagcattttttcttgtatctgttggctatataaatatcttcttttgagaagtgtctgttcatatcctttgcccactttttgatggggttgtttgttttttttcttgtaaatgttgattttatcaaatgctttttctgcatgtcttgatgatcgtgtggtttttgtccttcagtctgctgatgaaccacccttgcaaccctgagatgaatcccacttcatcatggggaatgatctttttgatgtgttcttagatttggttacctagaattttgtcaaagatttttgtatctatgttcatgagagacgttggcctgtagttttcttttttgtgtgtccttttctggttttggtatcaggacaatgcttggctcatagaatgaggaagaattccctccccttcaattctcggaatagtttgagaagaattggtataagttctgtaaaagtttaaaaggtagctgggcatggtggctcatacctgtaatcccagcactctgggaagccaaggtggacagattacttgaggacaggagttagagaccagcctagccaacatggtaaaaccccatctctaccaaaaataccaaaataccaaaaattctggttaaaataccaaaaaaatagctgggtgtggtggctggcacctgtaatttcagctacttgggaggttgaggcaggaggatcacttgaccccagaaggcagcagttgcagtgagctgagattgcaccactgcagtccagcctgggtgacagagcaacactctatctcaaaaaaaaaaattaatttgaaggatatctagtcctggtttgtaaagtgtttctgttgatactatttatacatccattgaagctatatatttttttattctctgaatgttgaaggtagggagcaggaagtactatctactcttataaatggttttatcataatcaaaataatcaaaacaaccatggtagcatacacacacacagaaaacatcttttcctggagggtaggtaggttaatgaaaaccttgcctcttttaatgaaattaagtaggaattccaaagattggattagatttatcttatctcagtcctgaatttcagacattctaaaattataaaaatataagaaaccaggtgtggggtgtgcacctgtagtcccagctacttggggagtctgaggcaggaagatcacttgagcccaggagttcaaggctatatggtgagctatgatagtcaccacactccagcct[149 bp omitted]gtctctactaaaaatacagaaaattagccgggcatggtgacaggtgcctgaaatcccagctactctggaggctgagacaggagaattgcttgaacccgggaggtggaggttgcagtgagttgagattgtgccactgtactccagcccgggcgacaatgcaagccttcgtctcaaaatatgtgtgtgtgtgtgtatatatatatatatatatatatatatatatgtgtgtgtgtgtatatatatatatatgtgtatatatatatacacacactttagcctcacctgcagattcacaaattgaagcaatcctaaatccacttttatttttaattgacaataattgtatatatttgcgaggtacaatgcgatgtttagatatatgtatacatggcagaaaaaagctaacatgtccattgccttagttactttttgtggtgaggatgtttaaaatctacttttagcaattttggagcatatattaatacatcttttcttaaattccatggcaggttaaatacatcattattaactctagttgccatgctgtgcaggggatccctaaaactcatttctctgactgaaacttgtttgtaccttttcatcaatatttcctttttccccattttatcccccagtctctggcaaccaccattcttctctctgctgctatgaatttaattgttttagaatccacacaattgagatcctactaaatctttttttttctttttcttttttttttttttttttggagacagagttttgctcttgttgcccaagctggagtgcaatgccacaatcttggctcactgcaacctctgcctcccaggttcaagtgattcttctgcctcagcctcccgagtagctggggttacaggtgcgcgccaccatgcctggctaattttttgtatttttagtagaaatggggtttcaccatgttagccaggctggtctcgaccccctgacctcaggtgatctgcccgcctcggcagtagcgtcgtaagcctgagcgcttgtgtaccgtgacatactcttctgctcaggacgtctcggtctggcaggtagctttagagcaggtggtgttcagggttcccatgcatgctctgtgccagcccttccgaccggctcacttgttgcttcactgaaacctcacagtaacccttgaagaggcaggtactctgatttccagcttccagaggagagcccagccttcgatgttcagttactttccatggcgatgttatcatgaaggttgcaggaggacttgaacttggagctgctgctctgctctcagcatcaccacgtgcgtcgacagcctcttagagttacctatgaggaaaccgaccctcagccttggtaccatgacacacggatcgaatcccctgccctcgctgctgtctgctgcaatgttattagcaatccgttgcagcagaacactccccggggtagaaagaaagtgaaagaatgcaggaaaaagcctattacttctccagggaggtggtcaacccatgacagttgtccagggactgccacctccccactcttttcaatgacagttgtccagggactgccacctctccactcttttcaatgacagttgtccagggactgccacctctccactcttttcaatgacagttgtccagggacggccacctctccactcttctcaatgacagttgcccaggcatggccacctctccgctcttctcaatgacagttgtccgaggactgccacctctccactcttttcaatgacaattgtccagggactgctacctcgccactcttttcagaggcccttcctgtatagaggatattcatgataacatgtttcctgtgtcccaggggaaaacgtgtacccacatatatcacctcatgtttttttttgtttgtttttttaagacagagtctcattctgtcacccaggctggagtgcagtggcacgatcttgactcactgcaagctccgactcccgggttcacaccattctcctgcctcagcctccctagtagctgggactacaggcgcccgccac[131 bp omitted]cactgcgctcagccacctcatcttgtaaagcatattaaattactaaatcagaacagggttagaaatattcaaacttggtcgggtgtggtggctcacgcctataatctcagcactttgggaggccgaggctggtggatcatgaggtcaagagatagagaccatcctggccaacatggtgaaaccctgtctctactaaaaacacaaaaattagccaggcctggtggtgcacgcctgtaatcccagctacttgggaggctgaggcaggagaatcgattgaacccaggaagcagaggtttgcagcaagtagagatcatgccactacactccagcctgggtgacagagtgagactctatcaaaaagaaaaaaagaagaagaaaatattcaaatttggctgggcgcagtagctcatgcctgtaatcccaacactttgggaggccaggggtaagaggattacttgagcccaggagtttgaaaccagcctgggcaacatagtgacaccttgtctctactttttttttttttttaaaggcctggtgcagtgatgcaagcctgtggtcgcagctactaggaaggctgaggtgggaagcttgcttcagcccaggagttcgaggctgcagtgagctgtgactgcaccactgcactccagcctgggcaacagcaagactcagtcatttaaaaaaaaaaacaaacaaaaaacaccacagcttattgaatagattttagctaccatgacatttctaggctcttgtctcccacctctaccctcctttaaatattttcttctgactctcctaattacttgaaattttataatttatcttctgactctcctaattacttgaagtaatctcagcaagcccatcttaaaactttcccatggaaagaatggtaggcagaaggaaagacgggggctaaatactggggacaactttgtccctgcaggtcaagggagtataaagcaggtgccctgtctaagcaagcagagccaaaaatccgtgttaacagaaaccctacaggctgatttttactttggtgggatgcttccagttccagggaggtgacatgacaagactttactgtgtatctgcaagtttagctcaaaaactataaatgtacagatgtcaagcaagggtgatctcacaccaataccgcccctcagacaatgacaagctgctgtctacctgagtctttaaaatgttttattacatggtattccttcgattgctttgtcatctaccacaaagtaatggtggggggaaaggagatttgctcaaactggccaaccagtactggctgtcactatttatagggctcttataatgacaagaaaaaaggaaatttgagagatttaggaattattcctggggccttataacaactgctacatttcaatgtcatcatagaccaggcttctagacaactcggggaggtaattgatagcagaggtcctggacgtgcacctataaaatgagttagcaggtagggatagaattggtcctgatggtgatttacgacattaatcttttcatgtgctcattagccatttgcatagcttctttggagaaatggatattcagaccctttgcccatattaaattggatcgtctcccttttagtgtatgtatattatctagatataaatcccttatcagatatgacttttaagtattcagcagtttatttttacaccaaaactgtttactgtgtttatggaacctgatgttaacaggtgtaacagaaatcaactgatctaagaaccctgtaactggttattagtaactggtaggaatctatttgccagaggtttttttttttaattttattattattatactttaagttttagggtacatatgcacaacgtgcaggtttgttacatatgtatacacgtgccatgttggtgtgctgcacccattaactcatcatttagcattaggtatatctcctaatgctatcgctcccccctcccccaaccccacaacagtccctggtgtgtgatgttccccttcctgtgtccaagtgtactcattgttcaattcccacctatgagtgagaacatgcagtgtttggctttttgtccttgcgatagtttgctgagaatgatggtttccagtttcatccatgtccctacaaaggacatgaactcatccttttttatggctgcatagtattccatggtgtatatgtgccacattttcttaatccagtctattgctgttggacatttaggttggttccaagtctttgctattgtgaatagtgccgctataaactagaatggcgatcattaaaaagtcaggaaacaacaggtgctggagaggatgtggagaaataggaacacttttacactgttggtgggaccgtaaactagttcagccattgtggaagtcagtgtggcaattcctcagggatctagaactagaaataccatttgacccagccatcccattactgggtatataccctaaggattataaatcatgctgctataaagacacatgccagtggttttttgttttttgagatggagtttcactcttgtccaggctggagtgcaatgatgcagtcttggctcactgcaaccttcgccttccagattcaagcgattctcctgcctcagcctcctgagtagctgggattacaggcatgtgccaccactcctggctaatttttttatatttttaatagagatggagtttcaccatgtt[134 bp omitted]atctgtggcatgcacgtccaattttattctaagatgctgtttgggaactaagggtacagacaacaaaatgtcccagcactgatgtctagtaataggataaacagatattgtggcaacaaatgcttcgtccatgaagaattgaaaagagaaggccgttcatctagtgaggtgattgatgttagttgtatctacttgagaatttgctgcaagatcctcttttaagtcttgtcactctttccacaggtcctacttgctctatattaccaaagaatccacttttcccccaaaacctgagctctcagccttgtatcaagatggaaggagacaaatcgctcaccttttccagctacgggctgcaatggtgtctctatgagctagacaaggaagaatttcagacattcaaggaattactaaagaagaaatcttcagaatcgaccacatgctctattccacagtttgaaatcgagaatgccaacgtggaatgtctggcactcctcttgcatgagtattatggagcatcgctggcctgggctacgtccattagcatctttgaaaacatgaacctgcgaaccctctcggagaaggcacgggatgacatgaaaagtaagcgagacttgggacaagtctagggcagggaggggaggtgatttcaggttctcatgggaacagggaagaatcgttgttcagtaaccggctccacctctgcagtgtgagtctgagctgtgagaaggatcctattggtcatcgtcattggttggaaattagtgtagtctctagcctgtaaaataatggaggagggagaaatgggtagacaacggctccacccacatggacttcattgaagttaataggatttgggttgtaagtgctaagcttgagctctggcgctatcacgggtcggttgtgagacttcgggcatgtctccttctgttctgacccttggatcccacatcttggaacaggaaatgtgttactgtgtgtgccattgcaaaagttcaataatgtgtaatgcataggaagtggctaagaacctcattggttgataacattggtagtggtttggtgcgagtctcgtgcttggccgtgggatgaaggactgaggttccaggtgctcatctgaggcttggactttcttgggctattggtgtccgtagtgcagcaagaattcggatcagattctatgattattttagggtacttaggagaaaggtcatttagaaaatagcagttcttttttatctagagaatctctccaactgtagactgaaaacaaatcccttgactgagcccttgaattggccctacaaatacaggtgtgggctggatgcagtgactcatggctgtgatcccagcactttgggaggctgaggtgggtggatcacctgaggtcaagagatcgagaccagcctggccaacatggagaaaccccgtctctactagaaatacaaaaaattagccaggcgtcatggcacatgcctgtaatcccagctactcaggagactgaggcaggagaatcacttgaatccgggaggcagaggttgcagtgagccgagattatgccactgcactccagcctgggcaacggagtgagactgtgtctcaaaaaaaaaaaaaaatatatatatatatatataatatatacacacacacatatatacacacacatatacacatatatttttatatatacacacatatttttatatacacatacacatacacacatatacacatatatttttatatatacacacatatatatttatatatacacatacacatatacacatatatttttatatatacacatatatatttatatatacacacatatttatatatacacatacacatacacatatatttttatatacacacatatatatttatatatacatatacacacacatatacacatatatttttatatatacacatatttatatatacacatatatttttatatacacacacacatatttatacacacacacacgcaggtggcatgcctgtacacatatatatttatacacacacacgcacacacgcaggtggcatgcctgtacacacatatatatttatacacacacgcacacacgcaggtggcatgcctgtacacacatatatatttatacacacacacacacacacgcgcgcaggtggcatgcctgcacatccgtgacctggatgcagctcagcagcattagctgcaaaacgcttcaagggctctctctcctgagcttggaaaaaaggcccagtgtggagggcatgtgggtattattcccaggaagagagtgcataaaaatgagagctagggtttatcaagtcagcactgcactgaaactgtcatgtccccaccatctgactctcaaccccacccagtgaaatgggttccctatggctgaagctgtgatagaggatcttacaagatacataacttgaccaacttcatgggctaataagtggcaaagatgagattgattgtttaacattcatctaccgtggcatatgtttaaattctcatatgtctggtgtcagagatttgcagttttccatgaggtagagagaaagaaatgggcaactttaaaaatgaatgatagccataaaaaaggatgagttcatgtcctttatagggacatggatgaagatggaaaccatcattctcagcaaactatcacaaggacagaaaaccaaacaccgcatgttgtcactcataggtgggaattgaacaatgaaaacgcttggacacaggaaggggaacatcacacaccggggtctgttgtggggtgggggaagtggggagtgatagcattaggagatatacctaatgtaaataacgagttaatgggtgcagcacaccaacatagcacatgtatacatatgtaacaaacctgcacattgtgcacatgtaccctagaacttaaagtataattttaaaaaaaaaatggatggtataggccaggtgggtgtggctaatgcctgtaatcccagcactctgggaggccaaggtgggtggatcatttgaggtcaggagtttgagaccagcctggccaacatggtgaaacactgtctctactaaaaatacaaaaattagccaggcatggtggcacacacctgtaatcccagctacttgggaggctgaggcaggagaatcacttgaacccgggaggtagaggttgcagtgagtcaagatcgcgccactgcactccagcctgggtgacagagcga[132 bp omitted]cttcagcctcctgagtagctgagactacaggtgcccgccagcactcctggctaattttttgtatttttagtagagaaggggtttcaccttgttagccaggatggtctcgatctcccgaccttgtgatccacccaccttggcctcccaaagttctgggattacaggtgtgagccactgtgcctggcctaaaataaaattttttaaaaattgtatataaaaatgtcttatggctgggcaccgtggctcacgcctgtaatcccaatactttgagagtcctaggcgggcggatcacttgaggtcaggagttcaagactagcctgtctaacacggtaaaaccctgtctctactaaaaatacaaaaaattagcctggtgtagtggcaggcacctgtaatcccagctactaggtaggctgaggcaggagaatcgcttgaagctgggaggcagaggttgcagtgagctgagattgtgccgttgcactccagcctgggcgacagattgagactgtcttttttttttttatagaaagtcttacagttcctattccagatgagagggaagtttagaatcacttcctagaaggagtaagctttaggctgagataaacaaagaagaggagttggcggagttgcctgagcatggtagagaaaaacattctgagcataaagtcagggcatcccaaagcctttaacagagggtttggctgggccacggagaatgagcaggaggtgaagacggagggactagaagtcagataacatggcatcttgaaaatacttgtaatagcaagtagaagcaattacatagtttgaaaggggtggtaatagaaatcatcaaactttcctttcagcactgttgcaaaagtgttgagtgacccagaggggattgtggaataaacacagggagacgagtttgaggtctttctactgtccatgagataaataaaggtggcttggaataggatgatggcacagaaagaagtagaaatggaagatgcttccaaagtgtacaagacagtttgtgtgtgtgtgtgtgtgtgcgcgtgcgcgcgtgcgtgtgtgtgtgtgtgtgtgtgtgtgtgtgtttgaaacagagtcttgctctgtcgcccaggctgggctgtcgcccagtgcagtggcgcgatctcggctcactgcaaactccgcctcccgggttcgtgccattctcctgcctc[224 bp omitted]agtgtcatgggtgatccccaagtttctggcatgataaactgggtggatggggttccatggcctcaccccatggaagagatgttttgcaaaaagtagattgggggatgggtagtcaatcttggaccttgtaagttgttgaaggtacctgtatttgggtaactcataggcatctagtgagtcattgactaactgggtctggagttcaagacaggtcttgaggaggactcctgaaaagaaacttaatcaccacaattaacctcattgtgtgacttacccaaggccatccagcaaaacggccagagaattcttcacaaacctctgtttcttcagtgtgcttctgctggctcaggaaagtctgactttgttgtctccgttataggccaatcatggaataaactgagatcctgaggtttgtcttggttcccctccataatttggacacgggacattcttatccttggcttgggtaattacagtgacttcattgaggccagtctccctttttctttgtcttccaggacattcaccagaagatcctgaagcaacgatgactgaccaaggaccaagcaaggaaaaagtgccaggttagaggggtggagttgggggaaataggatgtgcttaaagacacatggcagccagtttgcatctctaggcattagaaccatgacttctgatagtctagtgttctttctagtctaactaccctacattagctgaccggatgggttctgaggatctggtaattctggtatttctctttccaagttgaagagttctgtggcctggggccaggtctagtggctcatgcctgtaatcccagtactttgggaggctgaggtgggcagatcacctgaggtcaggagttcaagaccagcctggccaacatggtgaaacgtcgtctctactaaaaatacaaaaaaatagccagacgtggtggtgggtgcctgtaatcccagctacttgggaggtggaggcaggagaatcacttggacccggtaggcagaggttgcagtgagccgagatcacaccactgcactccagcctgggcgacagaacgagactccatctcaaaaaaaaaaaaaaaaaaaagagttctgtggtcttcaggctttcttacaacttgaggacttcccatcgtcttcagtttgggtaaccttatgaccccactatgacaagctcctcccaataacccagtaggaggctttggtggaaagaatcagatagcatgaaaccagattcaatacaattccccaaacattagagcactgacctcatgccagccactgctctgcgtatttacaatacatcgttggccaaagcatacgtgttcatgaaattcacacattgtgggacaggaaagacaaaccaaaaaactaagatgacacaagggaaggcaaaacacacagggagaaaggcaggctgcatagacaccatgaattctcctctgctacctgcgccgctaccatcttgctcagctcccagcagccagtgttgaccgtgaaacctaatctggtttggaaggggttgaagccaacctcgttttgatggagctttgctcaggctgtgggtggggaaagagctcttcaaagctaacatctgagtaactggcatctgaatcagaggctctgaatcccaaaggttctactttgctcagagtttgatgtcaatctaggcttcaccgggtgagtgtgacatgttatccttcatgtgataagactgcgtctcagaggttttataagttaccaaatggtggcttagagcgtaaaataaacacacagagtaaccttgatagtaggactgaaacaaacctgacaaaagccgggggtcttgccatcagccacgttaggagatccctctgagctgctcctggacacgagaactaccacttcttgagaccacttggatcacgcaccgtgccagtgctttagtccatgcttctcaatcctctgtggtactggctgtcgttagtcatgcagcgagacccagaagctcaatgcacaccaaagtctcacatggttaaattgaggcaaggtgggcttgtgccagaaagacctgactgcaggtgttatccacgtacaaagatgaaggccatcagagacagacactctaccctcaaggagcttacatcataggggatcacaggccttcgt[144 bp omitted]agacaccccatgtctactaaaaatacaggaaaaaaaaaactagccaggcgtggtggcatgtgcccgtaatcctagctactcaagaggctgaggcaggagaatcacttgaacccaggaggtagaggttgtggtgagccactgcactccagcctgggaaacaagagcttaactctgtctcaaaaaaaaaaaaagtcccttgaaactaagccaacccaataaatgcagttttttttttatcaagctatagaatcaaatgtggtccatgtatacaatagtatattatttggcataaaaaggaatgatgtggctggacacagtgactcatacctgtaatcccagcactttgggaggctgaggcaggcagattgctcgaacccaggagttcgagaccaacctgggcaatgtagcaagacccgacgtctaccaaaagaattaaaattagctgagtgtgggagtgtgcacgtatagtcccagctacttgggaagctgaggcaggaggattgcttgagtccaggggggttgaggctgcattgagccatgattgtgtcactgcacttcagcctgggtgataaaatgagactatgtctttaaaaaatatatatacacacatacattaatgtatgctacaagatggatggaccttgaagacactaggctaagtgaaggaaaccatcacaaaaagatatatattgaatgattccattcatataaaatgtctagaatcggcaaatccatttaaatactagattagtggttgcctagggctggggtgaatggggaaacttagagggtgaggactaagagggcagggtttttctcgttgagggtgattaagatgttctaaaattgtactgatggttacaatgtgaatattctcaatcatgattgcacactttcaatgggtgaattgtatgatttgtgaaatttatttctgtaaatctattacaaaactctagagaagacaataagatacatccatccgaagtcagcatcgtacgtatgacgactacaaagcccagagagacagatttgcccaaagaagatcagccaacagaaagcctgattttttttttctttccagactgagatgtcatctttgtgttagatcttttttcttttcctatgtcttttttttttttctttcccgcctagatagtctcgctctgtcacccaggctggagtgcaatggcttgatcttggctcactgcaacctctgcctcccaggttcaagcgattctcctgtctgcctcccaagtagctgggattacacacgcgcgccaccgtgcctggctaatttttgtgtatttggtaaagatggagtttcaccgtattggtcaggctggcctagaattcctgacctcaggtgatccacccacctcagcctcccaaactgctaggattacaggcatgagccaccgcacccagcctagatcttataaattctatgtaagttcagattctttcatctcttacatggtgaatctatttagtctaatagattgaatgtattatgatgctcaagacatagctcctaatataaatccacccccacaag[139 bp omitted]ctgcctcagcctcccaagtagctgggactataggcacctgccaccatgtccggctaattttttgtatttttagtagagatggggtttcaccatgttggccaggctgccttcgaactcctgacctcgtgatccacctgccttggcctcccaaagtgctgagattacaggcatgagccactgcgccttggcctttttttttttttttttccggataactcgatgcaggtttacatatcgtaaaatcttgagaatacaattcgaaaatttataaacatgaacctattaccataatccagtcttaggacatttccataacccaaaaaaaaaaaaaaatccttcagcagagacaacaagatggagaaaattggcctgtcttacttttgcataatttggaacgatcttacaattattttccttggaacgatcttacaattattttcccagaacctgatattgtaatgaatgacacttacagacttctttcaagtgttaaactgctgttgctttcctggaatacctgtgatataagcaccattacatacctttgatacacttctgatacagtttgctgataagtcacttcaaatttggcgtctgtgtttgagtgaactggtctgtaatctctttatatactttccttgcttttttaaagttgagagaaaattcatatatcataaaattcatcttaatacaattcagtgttttattgtattaacaaagttgtgtaaccatcactgctacctaatttcaggaaattttcatcaccccagaaaaccacatacctattagccatcactccccatacccagcccctggaaaccagtcatccactttgtgtctgtgaattttgccttttctggactttgcatataaatgaaatcagacactttgttatattgtgtgactggctttcttcatttaacataatgtttttgttttttgtttttgttttgagatggagtcgtgctctgttgctgaggctggagtgcagtggtgcgatctcggctcactgcaacctccgcctccctggttcacgctattttcctgcctcagcctcctgagtagctgggactacaggtgcctaccactacacccagctaattttttgtattttcagtagagacggggtttcacagtgttagccaaaattgtctcgatatcctgaccttgtgatctgcccacctcagcctcccaaagtgctgggattttaacataatgttttaaagatttgtcaatatcatagcctgtctcaggacttcataactttttatggctgaacagtattccttttatatatataccgcttcttgttcatttatcacatgatggacatttgggtttttttttttttttttttttgctattatgaacgatgcagctatggattcccacgtgtgtgtttgtgtagatgtgtttttgattcagggaggcctatacctaggagtggaagtggtgggtcatatggcaactgtgtttaactttttgaggagctctgccaaatggtttttcttgagtgactgcaccattttgcatcctcaccaacaccttaatgaaagctacagtaacgtttgctccactatttttcattgtaaccatcctagtagttatgaaacattgactgtggttttgatttgaatttccctaattatgttcagaatcttttcgtgtgcttattggctacttctgtgtctttagagaaatgtatattcaaatccttggtccttttttaacttcattatattgttgacttgcaatacttaggttttatcatctagattatgtagagacataattttatatattcccctgttctctgagttgtcttttcacattgctgatactgtcctttgaagcacagcgggcttttattttacaagacaaatttatttccttgattgtttgtgcttttggtgttatatctttaaaaaaattgtttaacccagctgggtacggtggcttacacctgtaatcccagcactttgggaggccaaggcggtggatcacaagatcaggatatccagaccctcctggccaacatggtgaaaccctgtctctactaaaatacaaaaaaatccaccaggcatggtggcgctttcctgtagtcccagctccttgagagagtgaggcaggggaatcgcttgaacccaggaggtggaggttccagtgaaccaagatcgtgccattgcactccagcctggtgacagagaaacgctccatctcaaaaaaaaaaaaaaaaaattgcttaacccaaaatcagaaggtttacaccaatatttcctcttaaggattttgtagttacagctcttaaaaacatttaggtctttaaacattttgagttaattttgtatatagcatgaagtagagggttcaacttcatccttttgtgtgtagataaccagttctccagcaatatttattgaaaacactattctttatcattgtctagatattcttgtctaaaatcacagatgtatgggattatttttaaactttccaatctattccattgatctctatatctgaccttgtgcctgaaccacactgacttaactactattgctttatagttttgaactcaaagtgtgattctccaacttgacttcaagatagattggctattctgggtctgttgaatttccatgtgacttttagtatcaatcagctttacaatttctgcaagcaaaaaaaggtagctgggattttgatgagattgcattatgtcatgtagattaatgttgggtatatgacacagtaacaacattaagtcttcaacccatggacacaaggtggtctttccattaatttagggttttcttaattttttttggttacgtttgtggctttcaggatacaagtctctcatttcatttgttaaatttgtcctgaaatattttgttctatgccattataagtggagtgtttgttttgttttcgttttgttttgtttgtttgtttgtttttgacagagtttcactcttgttgcccaggctggagtggtgtgatgtcggctcactgaaacctctgcctcctgggttcaggcaattctcctgcctcagccttccagtagatgggattacaggcacacgccaccatgcctggctaattttttgaatttttagtagagacggggtttcaccatgttggccaggctggtcttaaacccctgacctcaaaagattcgcctgcctcggcctcccaaagtgctggtattagaggagtgagccactgtgcctggcattgttcattttattttgtttactgccagtgtatagaaatacttttgattttgaatcgtcggatcttgaatctagtacttatgttactggcgcacactgccctggcgctgagccagtggttctgtgctctaaactggtcagaaaattaactatggcatgactaagtttatctggggtgtccaacatctctgatttgaataatatacacagtatgtttgtgtttattcttctcccttctcttttgcaggaatttcacaagctgtgcaacaagatagtgccacagctgcagagacaaaagaacaaggtgaatgaaatagatctattcatttgttgccctcctggaagaaagttgggtgagagaagttcatgtagttcaaaggacggggaaatccactttccctttcttcatcctcatttgtctctggtgtgtgagtccctcttccctaagagatcttgggatcagcaccatggacagaaccttgcacgttcactacgattattttcactacagttttttatttttaactgaaaaataagaattgtatatacttatggggcgtgaggtttcaatacacgcatatattgtagaatgatcaaatcagggtaactagtgtatccatcacctcaaatattctttgtgctgagaacattttatttttacttatttatttattttgagatggagttcttttcttgtggcccaggctggagtgcagtggtgtgatctcagctcactgccagctccgcctcccgggttcaagcgattattctgcctcagcctctcaagtagctggggctacaggcatgcaccaccacgcccagctaattttgtatttttagtagagacagggtttctgcatgttggtcaggctggtctggaactcccgacctcaggtgatccacccacctcagcctcccaaagtgctgggattacaagcttgagccaccacacccagctgtgctgagaacatttaaaatcctcttttagctattttgaaatagactttgttattaaccagtcaccacgttgtgcaatagaataccagaacttactcctcttgtctagctgtaagtttgtacctgttgactaatgttttccaactttcccggtccactctctgccccaccagcctctggtaaccactgttctaccctccaattctgagttcgacatttttagattccacgtgtcagatcctctggtatttctctgtgcctggcttacttcacttaacataatgtcctctaggttcctcaatgttgtagcaaatgacagaatttcctgtatgttttagagctgaataacccattgtgtatatacaccacatttttttaagggagtcttgctctgttgcccaggctggggtgcagtggcgcgatctcagctcactgcaagctccgcctcctgggttcaagtgattctcctgcctcagcctcccaagtagctgggattacaggcatgcgccaccatgcccagctaatttttgtatttttagtgcagatggg[134 bp omitted]tagttgtgaccctctttcattcccgactccagtaattttagctgtctctttttttccttggtcagtctggctaaaggtctgtcaattttgttcttttcaaagaacaaactggtaggtttgttttctctatggtatttccatcttgtattttgtttatttctttattccctttctctgcctgttttggggtgagtttgctactcactaaccccaaaagggggttctttcctactttaaggtgggaagttatattatatttcagatctttcttaggcatttatggctataaattttcctttatgcacggctctacctacacgctgtaaatattgctgtgttttgtttccactcatttcaaagtatttaattcccttttgtttcccctttgacctgttgaggatcgtgtggcttcacttccatatatttggaaattttcaaattttctgactgatttctaatcttatttcattgtgttaagagagcatactttgtataatttcaaggaacataaacttgaagcatgttttatgcctgatgtatctatcttgaagaaggtctgtttgcagttgagaagggcatgttttctgctgttgggtggagcgttggtttgatatctgccttcactgttttccatatcggtaaatagcgtcactatgtgcctggtcgtttacaccaaaagcttagtcgttttttgctcgtttgtttgtctcactctgtctcccaggatggagtgcggtcgcgcaatcttggctcactgcaacctccacgtcccaggtttaagcagttcttgtgccttgacttccttagtagctgtattttttaatatttattttctccaccatatatctagcaaatcagaagatcatatggtctctacccgtaatatatgacccatttttacacagttcttcccatcttctgtatttctgtggtgtatatacacaatgggttattgaaggcatttcatttgcgtcccaaacgcaatccacttttacatacaatcaatttttcatacaataaccaaggcgatctaaaaatttacgcctgtaacttgattcccatgcttaaaaatccttaagtggtttttattctgtttgtgattttaaaaaatctataatttttctctaattgacaagacaaagaccaccctaatgattgttctttaaaatggcaaatctattctcatatatcctaagacgaatttgtatttagcctcacatggtaactatttcctgataaatatatatagtggttattctcagtcagtggtagctactatatgccagaggctgtgttattactctaccaaatcatctccacagcaactcgacaacataagaacaatttctttgcttttctagatgagcatacagaaacatttaacttcagtaacttgatgaagatcttacaaatagtttatgacaactcacatttgaatcctgtgtctaattcaaatccaattctttttttaagagagagagttttgctgtattgctgagactacaatgcagtggctatccacaagcatgaccgtagctcactacagcctcaaactgctggactcaagtgattctcctgcctcagcctcccaagtagctgggactacaggcatgtaccacaaaatctggctctaagatcctaagatccttaattcttaactgtaggttttgcccctcatttaatttttgtattcttattattatttttggagtgcagtggcatgatctcagcttactgcaacctctgcctccaaagttcaagttactctcctgcttcagcctcctgagtagctgggattacaggcacgtgccaccatccctggctaactttttgtattttttagtagagatggggt[135 bp omitted]ctcttcaaggagaaatgagcctgggaccctcaccctcaagctttgaattagtgctcattgtaccagtgcactctgtcttctagctgagacagtggttgccatgttttcaactggccagaaaataaatatggcatgactaagcttatcttgggggtgtctgacatctctgactcaaataataaacacaagtatgttggaattcattcttcttttgcagaaatttcacaagctatggaacaagaaggtgccacagcagcagagacagaagaacaaggtgaggaaaatagatgtattccttggttgccctcctggaagaaagttgggtgaaagaagtgtaagtagtttagatttcaagggtatgtagtttagattgcctttcttcattctcatttgtctctggtgtcaaccccttcccttcaagctcttgatcagtaccatggatagagctacgcaagttcactgtgattatctacagtcagatactatgaagacaaaattctaaagaacccataattctaggggactcgaatcaatcacaactttgtttgatggatgttaaacatatggccaagagtagtcaaatgctgtcttcaaacttaagtggcagtaattatttttgtaattccttctatcaactaatatgtacatgaatacctgccattgaagaattgtgctggaattacagtggtaagaaaaacatgtcttgccttcatggcatttttttttttttgagaaggagtctcgctgtgtcgcccaagctgtagtgcagtggcgggatctcagctcagtgcaacctctgcctcccaggttcaagcgattcttctgtctcagcctcccgagtagctgggattacaggcacctgccactgtgcccgactaatttttgtatttttagtagagatgggg[132 bp omitted]tcttcaaggagaaatgagcctaggaccctcaccctcaagctttgaattagtgctcattgtaccagtgcactctgtcttctagttgagccggtggttgtcatgttttcaactggccagaaaataaatatggcatgactaagcttatcttgggggtgtctgacatctctgactcgaataataaacacaagtatgttggaattcattcttttgcagaaatttcacaagctatggaacaagaaggtgccacagcagcagagacagaagaacaaggtgaggaaaatagatgtattccttggttgccctcctggaagaaagttgggtgaaagaagtgtaagtagtttagatttcaagggtatgtagtttagattgcctttcttcaatctcatttgtctctggtgtcaaccccttcccttcaagctcttgatcagtaccatggatagagctacgcaagttcactgtgattatctacagtcagatactatgaagacaaaattctaaagaacccataattctaggggactcgaatcaatcacaactttgtttgatggatgttaaacatatggccaagagtagtcaaatgctgtcttcaaacttaagtggtagtaattatttttgtaattccttctatcaactaatatgtacatgaatacctgccattgaagaattgtgctggaattacagtggtaagaaaaacatgtcttgccttcgtggcatttttttttttttttttgagaaggagtctcgctgtgtcgcccaagctgtagtgcagtggcggtatctcggctcagtgcaacctctgcctcccaggttcaagcgattcttctgtctcagcctcccgagtagctgggattacaggcctgccaccatgcccgactaatttttgtatttttagtagagatggggtttcaccatattggccaggtcggtctcgcactcctgatctcgtgatctgcccaccttagcctcccaaagtgctgggattacaggcatttgccgctgtgcccagctgccttcatggcatttatcatccagacttacacattagctaaaccttatggaatgaagatgagtctaaagtgctataactttgcaggatgatgattaaacagccaaagatgtaagagcaggcttccctgagaaactgttgattgaggcttttttgttgagatataattaggattttatataccataaagttgaccctcctgaagtatatgattcaattatttttagtctattcagttatccaactgtcatcactaattccaagacattttttttctcccaaaaagaaaccccatacccctttgcagtcaccagtttcctctccctcaaaactctggacaaccactaatctactttgtatctctaaactctccgattccagatcggtcatgtagatggaatcatatgatatgtagttttctgtgactggccatgtttcacttggcataaagttccaaagcccgtgttccagtgtctatcagcacttcgtttttgttgctgaataatattccattgtatggaaagaccccattttcttcatctgttgttcagttcatgggaatttggcttttttctcactttggggctgttaacagtgttccctgaacactcatgtcctaggaggcagtgatggaaagaagtgacttgactagcatgagatattgaagatataaagctaactggaattggtgattggcagagttctgaaaaaaggggctctgggaattgctctcacctttcttctggaacgatctggtgggtggtgatgccaggagtcagtgactaacattttgagctctgagacagcttcaagctgggctattatcccacctgtgcaatgtaatgttgatcctgtgtgagctacataatcattcactcaaccaatatttgaaaaactaatggttgccagtgttgtcaactttaaattgggacgaataatatacacaaatatcggtgacatttttagaataattactctggtctaggcactgttctccacattttgattgtcaagacaccttcacgctaacctagtaaggggagatacactctccactccaccccttttttgaaacagggtcttgctgtgtcgcccaggctgaagtacagtggcacaatcacagctcactgcagcccctaactcctgggctgaagcaatcctcctgcctcagcctcctaagtagctggaaattaggcatatgctacaacatctggctaattttcatatttgttatagaaaggagggggcagggggtctcgctatgttgctcagtctggtcttgaactcctggcctcaagtgatctgcccatctcagcatcccaatgcactaggattacagggatgagccactacgcccagccaatccctactatataaatgaacaaattaccatataccggattgatgggaagccacaattaaatttatgtaaaacaaggaaaacaatgagctcatcatctgctccaaagtaggatcacaaacacaacctttttttcttgttatcacttagaaaaaacctatgagagaatattttttgttagaagtaaaagatgaggttttttgttttttgttttgagactgagtttagctcttgttgtccaggctggagtgcaatggcgcgatctcagctcactgcaacctccgcctcccaggttcaagcgatgctcctgcctcagcctcccgagtagctgggattacaggcatgtgccaccacacccggctaattttgtatttttagtagagagatggggtttg[142 bp omitted]ctgtgaccccttaaaggggcgagttagacacacaagtctggaattttaggaaagaagccctcacgaaggagaggatgggaaccctgaagtatagacgtgataattaaatccatagaaaaagaggtgtttgaggaagaactgagggaggcctgagtttgaatgcagactggcttcctggggtttccctccctctgtaaaaacctacattccagtggcactgccagtcctctgaggacaacaggtcggtctgagctcagcaaatagaggttctagtcttaaggtgtgcttcccgtggtttcaacacggctctgttaacacgtcccctgatgtggacgacagacggccctccgtttcccatgggttctgtgtccatggattcaactaaccatcgatcaaaaatattcaggaaaactccacaaagttccaaaaagcgaaatccgaatttgctacatgctgagcggtgcgttgagtccacacaaattgaagcgatgtgtagacatcgtgttagatattataagtagcctagagatgacttaacctacgtgggaagaatccacacaaatgaagcaatgtgtagacatcgtgttagatattataagcagcctagagatgacttaaactacatgggaggatgtgcgtaggttatatgcagttataccattttatatcagggacttgagtatctggagattttgatgtcatttggggatgtcctggaacccatcttggactgattcagaggatacaactacaatgaagtgtaagttctagaatttttatgtggagactttgcatacagttagtaattgtattacacatttgtgcagagagactcttgctgcctttttaaggtaaatagtagtaccagtaaacttaaggtcccaggatatgaatctttttcacgttcattgagtacctatcagatatcagaggctgaagaggctggaactattgaggcaaaaagacaaggtatttttctcatggagcttacattataagctagggggctgacaaaaactaaatgcataaaagagttgaagtttgtgataaatgtcaggtggtataaaataattatagtttgtgataagtttcattttttcacattttcaggccctgtgctaatgttgaatgcatattcttaaatctttatcaggtgggccgggcacagtggctcatgcctataacccgagcacttgggaggctgaagtgggcggatcacttgaggtcaggagttcaacaccagcctggccaacatggtgaaacctcatctctgcttaaaaaaaaaaaaaaaagaacaaatatatatatatgtgtatatataacatatatacatatatgtacatatatgtatatatgttatatatacacatatacatatatttatatatacgtacatacatatatacgtgtgtatacgtacatgcgtatatacatatgtatatgtatatgtgtatgtatatgtatacatatgtatatgtatgtatatgtgtatatatgtatatatacacatatatatacatacacacacacacacacacatgaaattagctgagcatggtggcaggcacctgtaatcccagctacttgagaggctgaggcaggagcattgcttgaacctgggagatggaggctgcagtgagccaagatcacgctgctgcactccagcctgggcaacagactgcaactgtgtctcaaaaaaaaaaaatcttcatcaggtggggaaactgaacagcagcttgtatcaaatcatacagatgctctacagcaggggtccccaacccccaggccatggacttgtagggtggcctcttaggaaccaggcagtatagcaggagggagcaaagcttcatctgtatttacagctgctccccatgactcatgttaccacctgagctctgcctcctgtcagatcggatgtggcatttggttcttccaggagcatgagccctattgtgaactgcacatgtgagggatctgggttgcgtgcttatgagaatctaatgcctgatgatctgtcagtgtctccatcacccccagatgggaccatctagttgtaggaaaacaagctcaggctcccactgatcctacattatggtgagttgtatgattatttcattatatattacaatgtaatcataataaagtgcacaataaacataatgtgcttgagtcatctcaaaaccacccccttccaccccggtgtgtggaaaaattgtcttccacaaaaccggtccctggtgccaaaaaggttggggatcactgctctaccgtagagcttgggttccaggcgggatctgtttgacctcaaggaacgtgctccgttctctctctctctctctctgtctctctgtttttttttgagatggagtctcgctctgtcgcccagtctggagtgcagtggcacaatcttggctcgctgcaagctccaccttctgcgttcatgactttctcctgcctcagcctcccgagtagctggcattacaggcgcccgccaacatgtctggctaactttttttttcgtatttttagtagagacggggtttcactgtgttagccaggatggtctcaatctcctgaccttgtgatccacatgcctcagcctcccaaagtgctgggattacaggggtgagccagcacatccggccattcccctctttatgtacagcaggattcccccattgcgtgggggaaaccaagggatggaacaggaggggcacacctgtcctacaggtgtagaacttggggccatggtacatgcatccgtggctccctcaagttcccctccccctccccaaggccacttatgttggcatacatcattcatttaacaaatacttgatttcccacagagtgccaggcactgtcataaatactgaaggtccaagagtgagtaagaaagtccatgtttagattctacggggggagaccatcagcaaatacagcgtaacccatcaggtccccagtgcaaaaagggacatcgggttgaacaagggaagcagagctattttgtagattgttaagaagcttttgaggcctttaaagtagggaacgaagagtgagcatgttctcagcacctggctaggaagaaacaagacccatgtctggaggctgactcaggccccactgatgctcggtccagggtttctgtgagg[132 bp omitted]aaaccccgtctctactaaaaatacagaaaattagctgggcgtggtggcaggcacctgtagtcccagctactcaggaggttgaggcaggagaatggggtgaacccaggaagcggacgttgcagtgagctgagattgcgccactgcactccagcctgggtgacagagcaagactccatctcaaaaaaaaaaaaaaaaaaaaaatagactggcttcaaattttgtttcccgatttatttttatttttattttgagatagagtctcgctctgtgaccaggctggagtgcagtggtgtaatctcagctcactgcaacttccatctcccgggttcaagcaattctcctgcctcagcctcctgagtagctggggactacaggtgccaactaccatgactagctaatttttgtatttattagagacggggctttgccattgaccaggctggtctcaaactcctgacctcaggtgatatgcccatcttgacctcccacagtgctgggatgacaggtgcgagccactgtgcctggtctgtttcctgattttcattctaccctctctgactccaggacatggaggtgacacatgggactacaagagtcacgtgatgaccaaattcgctgaggaggaggatgtacgtcgtagttttgaaaacactgctgctgactggccggaaatgcaaacgttggctggtgcttttgattcagaccggtggggcttccggcctcgcacggtggttctgcacggaaagtcaggaattgggaaatcggctctagccagaaggatcgtgctgtgctgggcgcaaggtggactctaccagggaatgttctcctacgtcttcttcctccccgttagagagatgcagcggaagaaggagagcagtgtcacagagttcatctccagggagtggccagactcccaggctccggtgacggagatcatgtcccgaccagaaaggctgttgttcatcattgacggtttcgatgacctgggctctgtcctcaacaatgacacaaagctctgcaaagactgggctgagaagcagcctccgttcaccctcatacgcagtctgctgaggaaggtcctgctccctgagtccttcctgatcgtcaccgtcagagacgtgggcacagagaagctcaagtcagaggtcgtgtctccccgttacctgttagttagaggaatctccggggaacaaagaatccacttgctccttgagcgcgggattggtgagcatcagaagacacaagggttgcgtgcgatcatgaacaaccgtgagctgctcgaccagtgccaggtgcccgccgtgggctctctcatctgcgtggccctgcagctgcaggacgtggtgggggagagcgtcgcccccttcaaccaaacgctcacaggcctgcacgccgcttttgtgtttcatcagctcacccctcgaggcgtggtccggcgctgtctcaatctggaggaaagagttgtcctgaagcgcttctgccgtatggctgtggagggagtgtggaataggaagtcagtgtttgacggtgacgacctcatggttcaaggactcggggagtctgagctccgtgctctgtttcacatgaacatccttctcccagacagccactgtgaggagtactacaccttcttccacctcagtctccaggacttctgtgccgccttgtactacgtgttagagggcctggaaatcgagccagctctctgccctctgtacgttgagaagacaaagaggtccatggagcttaaacaggcaggcttccatatccactcgctttggatgaagcgtttcttgtttggcctcgtgagcgaagacgtaaggaggccactggaggtcctgctgggctgtcccgttcccctgggggtgaagcagaagcttctgcactgggtctctctgttgggtcagcagcctaatgccaccaccccaggagacaccctggacgccttccactgtcttttcgagactcaagacaaagagtttgttcgcttggcattaaacagcttccaagaagtgtggcttccgattaaccagaacctggacttgatagcatcttccttctgcctccagcactgtccgtatttgcggaaaattcgggtggatgtcaaagggatcttcccaagagatgagtccgctgaggcatgtcctgtggtccctctatggtgagtaccccaggcagttttatcctatgccgtgtgctgagctctgtgtctctactgctgggacttgacatgacttccaggaacttcaaggtcccagagaattctttcaggatgaatggcccagatgacgtccagctggctaaaatgccaggaccggaatctggctcattgtccacacctgggaaaggtctttcacaatacagggccccgcctaagactaaaggaaaggctctggggttgaaacccaggaatatgtggtttattttattattttaagtcagagtctcactctgttgccaggctggagtgtagtggcacgatctcggctcactgcaaactccacctcccaggctcaagagattctcctgcctcaggctgccgaggagctgggactacaggcatgcaccaccatgcccagctagtttttgtaattttagtagagatgggatttcgccacgttggccaggctggtctcgaactcctgacctcaggtgatccacccgcctcagcctcccaaagtgctgggattacaggcatcagcaagcccctcccatgaatgtgaccgctcaggtttgtggactgcttatttggtatggtgtccagggccgtgctgtccagtagagggttctgtgatggaaatattccatgtgccttgtccagtaggacagccaccagcctcataagcctgttgagcatctgaaacatggtgagtgagactgtggaggtgaaactcatctcactccatttcaactcatttgtatttttttctttttttgagacagagtctcactgtgtcaccaaggctggagtacagcagcatgatctttgctcactgcaatctctgcctcccgggttcaagcgattctcctgactcagcctctcaagtagctgggattataggcagtgccaccatacctggctaatttttgtatttttagtagagacagggtttcaccatgttggccaggctgatctcgaactcctgacctcaggtgagccacctgccttggcctcccaaagtgctgggattataggcataagctgctgtgcccggcctcatttgtatttaaatagtcacacatagctgatgcttgctgaatagtgcaggtctagaaaacacactttgctggactgtctcagtgtcatcctcctatgacccagaacacagcagtgacgaatgtggacaggctgggtggacgaggattacttgaggccaggtttttgagaccagcctgggcaacaaagtaagaccctgtctgtggacaggctgggtgcagtggatcatgcttgtaatcccagcactttgggaggctgaggtgggtggatcacgaggtcaggagttcgagaccagcctggccaacatagtgaaaccccatctctactaaaaatacaaaaattagccaggcatggtggcgcacacctgtaatcccagctactcaggacgttgaggcaggagaattgcctgaacccaggaggcagaggttgcagtgagccgagatcacgccactgcactccagcctgggcaacagagtgagactccatctcaaaaaataaaaaaagcctcaaattatcacatggggctgggcgcggtggctcatgcctgtaatcctagcactttgggaggctgaggcaggtggatcacactaggtcaggagttcgagaccagcctggccaacatagtgaaaccccatctctgctaaaaatacaaaaattagtggggcgtggtggtgggtgcctttaatcccagctactcaggaggctgaggcaggagaattgctggaaccccgcgggcggaggttgcagtgagccaagatggcaccactgtgctccaacctgggtgacagagtgagactctatctcaaaaaaaaaaaattctcacatggaagaggtctggcacagcacctgctgtgtgctaaggccttgataacagggcagctacctttggttggaaaacaagtacaaatgcttgctttttaggaggtgagctcatgtcagtgcagaaagaaagaacagcttgcccgttactttgttctttccacagccaagaggagtcacagcctgggcaattttcctgtagattggctgaaaacgtgcgcagccacaggctaagcactgagatgggaaatttacatatcataaaaagtcaaagctacttgtgttcacagctaccctgtgctatacttacattcattcgctttcttcttcttttttttttttttttttgagacggagtcttgctcggtcacccaggctggagtgcagtggtgcgatctcagctcactgcaacctccacctcctgggttcaagcgattctcctgcttcggcctccctagtagctggactacagttgcccaccaccacacccggctaacttttgtatttttagtagagatggggtttcaccatattggccaggctggtcttgaactcctgaccttgtgatcctcccatcttggcctcccaaagtgccgggatgacaggcgtgagcgactgcgcccggcctctatttttcttttattcttgagggcaaacccatgaggttagctccctgttcacaaacgtgggaaggtatacactcagacacgtgggaaggtataaactcagacaggagatgattgccagtggacgggagactaattgctccaatttttaggtgtacgatacaatattaactacaggcacgacattgaacaatggatctctagaactttttcatctcacatcactgacccttcatgcccatgaaacgataactccatctcccctgctccccaggcccccggcagcctccactctactttctgctattttagacatttcaaagtagaatcatgagcccagtgtattggtggctcacgcctgtcatcccagcactttgggaggccaaggtgggtggatcacttgaggtcaggagtttgagaccagcctggccaacatggtgaaaccccatctctactaaaaaaatacaaaaattagccaggcatggtggtgggcacctgtaatctcagctacttgggaggctgaggcaggaaaatcactcgaatttgggaggcagaggttgcagtgagccaagatcatgccactgcactccagcctgggagatagagactccgtctccaaaaaaaaaaaaaaaaaaatgtagactcatgcagcattttgcagtatttgtccttttgtgactggtatagctcacctaacataatatcctccaggttcatccacactgtcaaaaacggtagaatgtcctcctctaaggacgagtaatattccattaacatatgtatcacatgttctttgttcatccatggatggacatgtaagttttccagatctgagctattatgaaaatgccacagtgagcgtgggagaccaaacacctcttccacatcctgatctcagttcttccgggtatacacccagaggtaggattgttaggtcctatggtagctctattttaatatttttttaggaacctctgtactgttttccacagctgttgcacagttttacgttcaagtggggctggaattgaagcaaagatctgatgcagggctgggcacggtggtggctcacacctgtaatcccagcaccttaggaggccaaggcgggggcagatcatgagatcaggagttcgagaccatcctggccaacatggtgaaaccccatctctattaaaaatgcaaaaattagctgtgcatgatggcatgcgcctgtagtcccagctactcgggaggctgaggcaggagaatcgctcgaacccaggaggcagaagttgcagtgagccgagattgcgccactgcgctccagcctgggcaacggagcgagactccatctcaaaaaaaaaaaaaaaagatctgattcaggagctggcggttcccagtcatgcctgcataccccctcgggtatcggtatatccgggaggcagggtggacaccgggctagtcatgcaaagtgtgatggcagccgctaagttgcctcagggcctctaaagccaccgtggtctcacctcgagagctcggtccctctcctccgacgtgttgccacgactgctcatgttaaactccatcccatgagcccatgtttctatcccccctgacataggatgcgggataagaccctcattgaggagcagtgggaagatttctgctccatgcttggcacccacccacacctgcggcagctggacctgggcagcagcatcctgacagagcgggccatgaagaccctgtgtgccaagctgaggcatcccacctgcaagatacagaccctgatgtaaggctgcccgccccctacgagagaatcccttcccatgacgctatcccagctctcccctacctcctgagagacccatctgaagcctttcaagtgcagcctgagggcataagtgccaccaaaggtgtaggaaccaagttcccaaaagcaca[132 bp omitted]tgaaaccccatctctactaaaaatacaaaaaaaaaattagcagggcatggtggtacgtgcctgtaatcccagctacttgggaggctgaggcaggggaattgcctgaaccagggaggtggaggttgcagtgagccaagatcgcaccacggcattccagcctgggtgacagagtgagactccatcttaaacaaaaaacaaaaaaaaaccttgtgctgatgttactgaagcaggctccttgacaccaggtttggacgggtttggatggattaagctccccaaggcagggattgttaatactctttcatacaccattcccagtagctggcccatcacaggcactcaggtattcgttgttttaaaaggaaatacaattaattagaaatttgcaagttagaatgggagaaggatgggaaggaaaaatgaggatacaactaaacatcaccagtgtcgaatgtgtctccccttccccattgcaggtttagaaatgcacagattacccctggtgtgcagcacctctggagaatcgtcatggccaaccgtaacctaagatccctcaacttgggaggcacccacctgaaggaagaggatgtaaggatggcgtgtgaagccttaaaacacccaaaatgtttgttggagtctttgaggtacgtctctggtagagcttttgccttgtttttcttcgtttttacttgtgtttgaaatgattacataaagtggcaaaaattaaagagctgcaaagatggaaaagttttggtgatggatggtggtgacgattgcaggagttgagtgccactgaattgcacacctaaatagttaaaatagtgcattcggttataaatactttatcacaattaaaaaaactcagtttcattaaaaattgttcatgcagaggcaaggtctcgtttggttgctcagtctgatcttgaactcctgggctcaggtggtcctccccgcttggcctcccagagcactgggattataggcttgagccaccatacc[145 bp omitted]gaaactccatctctaccaaaaatacaaaaattagccaggcgtggcagccacctgtaatcccagctactcgggaggctgagtcaggagaatctcttgaacccggcaggcggaggttgcagtgagctgagaccgtgccactgcactccagcctgggcaacaagagcaaaactctgtctcaaaggaaaaaaagtgcccttctggcagtttctcccagtggttaatcttacatactatcgcataatatcaaaactgggaaacagatcctggtatggtgtgtgtacattattctatagcagtttattacatctagatttgtgtaacagtcacagtaaccaagatgctctggggtcacacacccctccctaaccgcaccattcctaatcctcaggagccacgtgtgtcttccatctctgtataaccttgtcattttgacaatgctcttaaagtgaaatcggtgtggtacatcgtcgcctgaaactggctttgctccatcagcgcttgagatccacccaagcagtcaagtgttacacactttcttcctttctgttgatgatggccattcaatgctatggagtaccacagtttaaccattcaccatccagggacacgttggttggttggttggttggtcggtcccagtttgtggctcttactgtggtttgtaagtcctgggaaggtggttttttcattagattagcttggtttagagatacaactatttaatgtttatatagttttcttttctttttgactgagtctagctcagttgctcaggttggagtgcagtggcatgatctcagctcactgcaacgtccacctccctggttcaggcaattctcctgcctcagcctcccaagtagctgggattacaggcacccgccaccatgcctggctaattcttgtatttttagtagagatgggggtttcaccatgttggccaggctgtcctcgaactcctgacctcaagtgatccactggctgtgccctcccaaataaagtattctgagacagacaagtacaagccctgctttgagctttgttagctggcacatcaactaacatcgaagaatagtaagaaagaagaagaatttgctttgtaccatgtggtgtttgcctggcagccagggaactgcactttaagaagatgtaacccagggaaattagccaaagcataaatgttgtctcaggacggaaatgctgtgcctgacatcgtgtggggtttatctgggaacagatggaggaagctgcatgctcactcttttgctcactgtctgcaccacaagtgcagagagctggagcttagattcaaagaataaataagatagacattgtcggaaaagatggatggaggctatttggggccaaggaaggaaaaagcatgaagtcacttaggtccagtttcctggaagtctaacgaatttaccttctcataactcaactaatgaatttaccttctcataactcacaggggcaggagtattgctctcttctcttcactcctgtattcccggaacctagaactgctcttttcctgacacctggcccgtattccccaaagtacttattggatagagggatgggatgatcagctaagtctctaaatgggagactttgacattggaagatggattgggccacatcgtgaagggtttccattcactatcacattgaggagttggaacttcctttattcaataacgacagatgcttgattctgcgtatagtacatgttccagggatgtgctgatgaatgaaacgagattctttgattcaataacgacagatgcttgattttgcatgtagtactacgacatgttcctgggacatgctgatgaatgaattgagattcttttttttttttttttttttttggagacagagtcttgctctgttgcccaggctggagtgcagtggtgcaatctcggctcattgcaagccccacctcctgggttcacgccattctcctgcctcagcctcctaagtagctaggactacaggcgcccgccaccacg[175 bp omitted]ttgattctgtgtgtagtagtatgacatgttcctgggacatgctgataaatgaaacgagattgttttattcaataacgacagacgcttgattctgcgtgtagtactacgacatgttccagagatgtgctgatgaacaaaacgagattcctgctctcatggtgctcacaggccagcacagggagagcagaacaagacaaaaagaatgatgtgtgcacacacacggcaggagcatgtataggcttggagagctctaaaagttctgtctaaaattcaacacagaccaggcacagtggctcatgcctgtcatcccagaactctgggaggctgaggcaggtggctcacctgaggtcaggagatcaagaccagcctggccaacatggtgaaaccccgtctctactataaatacaaaaattagtcgggcatgatggcatgcacctgtaatcccagctacttgggagactgaggcaggagcatcacttgaacccaggaggcagaggttacagtgagccgagattgcgccactgcactctagcctgggtgacagagtgagactgtctcaaaaaataataataataaaataaacctgcttccttcatctctgccctagccaggtactggcctaagtgtttcgtggctattctaatattctaatcctcacaaccatcgctgaggttggtagtgctgttgtcctcatttccagggcataaactgagttgcagagatgctaagctattcggttaacagggaattaagtgatgtgttagatttgggggtggatgtgctggctcgtggggtagctgtgtacgttcctctttcgtaaatactgccggtcatcccggaagctcgtgcccttcagcaaatgctcgagtgccctttgtgtaccaggcaccgtcgcagctgccgaggggaccatagagaacaaagcaaccaggcctccaccttcatggagatgacattctaggaaggaagacaggcaggaaacaagcactaacataagtatgtggaacgttgggtggaggccgggcacagtggctcatgcctgtaatccagtgctttgggaggccaaggcgggtggagcacaaggtcaggagtttgagaccagcctggccaacatgatgaaaccccgtgtgtactaaaaatacaaaaattagccaggtatggtggtgggcacctgtaatcccagctactcaggaggctgaggcaggagactcgcttcaatccgggagatggagattgcagtgagccaagattgcgccactgcactccagcctgggtgacaagagcaagaccctgtctcaaaaaaaaaaaaaaaaaaaaatgttggctggggtgggttgctatgaatgttgagacaatggagggaagtggggtaggcaccatttaaggtctggcttacccgaaaggcgaccttcaagagacatgaaaggacgtgaaccccatgaaaacctgagggagggaggaggggaggttgcactggaaggaacagcaacttctcaggcccggaggcaggagcagacagagttcgaggaccaggaaaacggccagcgctgctggcgtgtgctgagtagaggggaaatgggctgctttggacaagagctgggattgcttcatgctgcctgtctctgcaggctggattgctgtggattgacccatgcctgttacctgaagatctcccaaatccttacgacctcccccagcctgaaatctctgagcctggcaggaaacaaggtgacagaccagggagtaatgcctctcagtgatgccttgagagtctcccagtgcgccctgcagaagctgatgtgagtgccacttcctttccaccaggattatcgtaacttccaccaggattatcgtaacttcgattctccaggtcatggtgggagggaaatgagcagatgtacaaaccaggggtgaggaaggaagttgggacctcccaagacctgcccagtgtggggtgtaagagtgacctgaaaaacatctgttcttgctcccaaactctaaatggagataaaaggtggacgcgggaatcagccaggtggaaattgcataatgaccttccctcctgataaagctctcctgggcgtgaggcttatgtgtgcagcttgcactgtgggttagtgaatgcttggccccaccactggagaggtatacccactcagtcactcaaagaacatgggtggcggtcaggctcccctctgcctggtaaagtccaggccagagctcatgcattctgggcttctgggcacagagaggctcaaaaaggaggagggtcacccaaaatcccaatcccacctccttctatggagacgagggagcccagagcagggatgaacccaggcctgtgttgttgtagcagaagggcctccgagtggaaacgcagggggcagcagttctgcacccctaacacctaaagggatatcacttctttccttttccgtgtcagagttttgttgttgcccaggctgagtgcagtggtaagatcctagctcactacagcctcaactcttgggcccaagtgatcctcccgtcttggcctcctgaagttctgggactacaggtgtgagccaccatgcctggcccacttgcttactgataactgatctagggaggggaggcgaagcagcagcaacagttacagcaaccactattcaatgcttactgagctgtgccaagcacagcgctaaaatccctccaacccttcctcgctgagttctcaaaacaggtctacggagcaggtgctgttgataaccctatcgacagatgagacagcttcagaaaggctgtgtcacttgtccacagttggacggtgctcagatggtgatgccgggagtcaagggtggggctaattcagctgagccacccagcgtggcagccattatccacgtgtggccagccaaatctaaattaaatgggaaagtcagtttcctcatcacactagacccatgtcaagagctcagtagccatgtggggctagcagctcccattctggacagcacagctctaggtgacctttaatcttacctggatggcagtgctggtatcagcagtgagacatccaggctcagagggtgacatctgagctctcgatcacaccctgagctctcgatcttgggtgtcatattctcaaggggaaggggcgttcactccaagttctctttacgggaaaacacctatcactcatgtagcagactgtttctggaatcacttcagtgctacataaaaagctgcttaaatggccaggtgtggtggctcacgcctgtaacccagcactttgggaggccgaggcgggcggatcacctgaggtcggcagttcaagaccagcctggccaacgtggtgaaaccccatctctactaaaaatacaaaaaaattagctgtgcatggtggcaggcgcctgcaatcccagctactcgggaggctgaggcaggagactcacttaaacccgggaggcgtaggttgtggtgagccaaggtcacgccattgcactccagcctgggcaacaagcgcaaaactccatctcaaaagcagacagagtatctagtttatgcctaagggtcatgatgtgttagatgtagttttggggggtggtcttgctcactgttctggagtacagtggcacaatcacagctcactgcagcctctacctcccaggctccagggatcctcctgcctcagcttcccaagtagctgggactacatgcatgtaccaccatgcccggctaattttttctttttagagacagagtcttgctatgttgcccaggctggtctcgaactcctgggctcaaacagtcctcctgcctcagcctctcaaagtgctgggattacaaacacaaaccacggtgcccgccctaagtgtacttttaaattggaaaaattggcccagtacagtggctcacgcctgtaatcccaacactttgggaggctgaggcaggcagatcccctgaggtcaggagttggaggccagcttcgagaccagcctgaccaatatggtgaagccctgtctctaccataaatacaaaaattagtcaaacatggtggtgcatgcctatgatcccagctactcaggaggctgaggccggagaatcatttgaacctgagagcagaggttgcagtgagctgagatcatgccactgcactccagcctgggcaacagagcgagactccatctcaaataaataaaaataaataagaaaataaataaattggaaaaattactcattccggcaaagccttacatcatagccatgtggggactggaaatggctgagcagtgattgttgcccagccattccccattgtgactggcagatctaatcacccacaatacttagagtattcttttggggctgatgcactggagttgagtttgcaagttaaaggcagagaggatgcgacttcaccatatgtctgcaaggacatgccaactatgggggtgatacgtctttcccctccttgtaaaggagggaaagatggaactttaagaaggcatctcatcatgtcctctctggggctctcttcttgcagactggaggactgtggcatcacagccacgggttgccagagtctggcctcagccctcgtcagcaaccggagcttgacacacctgtgcctatccaacaacagcctggggaacgaaggtgtaaatctactgtgtcgatccatgaggcttccccactgtagtctgcagaggctgatgtgagtctggcttgctcccctgcaaggacttcctagctttctaacatagcatggtgtagctctcaaagcagaaggcagtggggagggggtgtggacatcatcacatgaagggacctggtatatgctgaattctgtccatgtctcctaggtttcatcctttcttggaaaattctgtgtctgcctttgtgttatcttacagtgggaagtcatttgttcaaggacagtcagttctcataattggaggtcatcatgttctacaaagtcactcttgagcactgaaccagccagcatggagccattgcccctgggagaggtacagggttagcttcctgtgaacctctagtcacgttttcatcaatcgatgaaaatgtatttcatgtttctgttcaatgacttttacttgatacacatcgttgattcgttaacattgagcacatgaccaacggcaccgtgactcgtgcctgacaaagcctatctgacacaagtgatggacctcacagcctccccacgctccccagcattggagagcactttggcgctatgctaggaggtcattttaaacaacactattgcagcggggcgcggtggctcacacctgtaaccccagcactttgggaggctgaggcaggtggatcatttgagctcaggagttcaagaccagcctggccaacatggtgaaatcccatctctactaaaaatacaaaaaattagccgggtgtggtggcgcatacctgtaatcccagcgactcaggaggctgaggcaggacaaccacttgaacctgcgaggtggaggtggcagtgagctggcatgagctgagattgtgccattgcacgccagcctgggcaacagagtgagactgcatcacaaaacaaacaaaattgcccacaaaaagcacaaaaatccaacaaacacggcactaaataccctcaaaaaggacattgttgacagtggagagctgaaatcagttcagcctccactgggagcaacgtgtgtctggagactcaagttcttctctgctctgcacacatgcatgaccaggaaggactgagcactcccggtattgatttggagaattaccaacacattatagcaagtaggaaaattcacaaatacagaatccataaataatgaggatcaattgtgttgattactactgcatttattagttgctagtgatacagacacaatacagatgcagttctcattatttttccaaaagttattggggtacaggtggttacatgagtaagttcttttcttgttgtgttttgagacagtttggctctgtcacccaggttggagtggcatggcgcaatctcagctcactgcaacctccacctcccctcccaggttcaagcgattctcctgcttcagcctcccaagtagatgagattacagctgtgcaccaccacacctggctactttttgtatttttagtagaggcagggtttcaccatgttgtctaggcttgtcttgaactcctgaccacaggtgatctgcctgcctcccagagtgctgggattacaggcatgagccaccatgcccagccaggttacatgagtaagttctttagtggtgatttgtgatattttggtgcacccatcactcaagcagtgtacactgcaccatgtttgaagtcttttatccctcgcctccctcccattcttcccccaaaatccccaaagtccattgtatcattcttatgcctttgtgtcctcatagcttagctcccacatatcagtgaaaatatacgatgtttggttttccattcctgagttacttcacttagaataatagtctccaactcatccaggtcactgcaaatgctgttaattcattcctttttatggctgcatagtattccatcatatatgtatgtgtgtgtgtgtgtgtttctttatccactcattgattgatgggtatttgggttggttccacgattttgcaattgtcagttgtcctgctataaatatatgggtacaagtatctttttcgaatattgactactttttctctgggtggatgcccagtagtgggattgctgggtcaaatggtagttgtacttttagttctttaaggaatctccacactgctttccatagcggctgtactagtttactttcccaccagcagagtggatgcgttccctgatcaccacatccaccccagcatctactgtttttttatgttttgattatggccattcttgcaagggcgatgtggtatcacattgtggttttgattgcatttccctgattattagtgatgttgagcctttttcatacgtttgttggccatttgtatatcttgagaattgtctattcatgtccttagcccactttttgatgggattgttttttcttggatttgtttgagttcgttgtagactcgactctagattgtgaagattttctcctactctatggattgtctgtttactctgctattctttttttttttttttttttttttttttttttttttttttttgagatggagtctcgctctgtcgcccaggctgcagtgcagtggcgtgatctccggtcactgcaagctctgcctcctgggttcatgccattctcctgcctcagcctctcgagtagctggtagctgggactacaggcgcccaccaccacacccggctaatttttttgtgtgtgtttttagtagagacagggtttcacca[137 bp omitted]caattaggtcccagctatttatctttatttttattgcattcacttttgggttcttggtcatgaaatccttgcctaagccaatgtctcgaagggtttttcccatgttatcttctagaatttttagaatttttatagttttaagtcttaggtctttttttttttttggagacagagtcttgctctgtcacccaggctggagtgcagtggcacgatctgagctcactgcaacctccacctcccaggttcaagtgattctcctgcctc[210 bp omitted]tgttaggtgagagatgaggatccggtttcattctccgacatgtggctagccaattatctcagcaccgtttgtcgaaaagggtgtcctttctccactttaggtttttgtttgctttgttgaagatccgttggctgtaagtatttgggtttatttctgggttctctattctgtttcgttggtctatgtgcctatttttgcacgagtaccacactgttttggtgactatgccttatagtttgaaatcaggtagtgtgatgcctccagatttgttctttttgctgagttttgctttggccatgctggctctttttttggttccatttgaattttagaattgtttaattctgtgaagaatgatggtggtattttgatggggattgcgttgaattttgtagattgctttggcagcatagtcattttcacaatattgattctacccatccatgagcatgggatgtgtgtccatttgttcgtgtcgtctgtgatttctttcagcaatgttttgtagttttccttgtagaggtcttttacctccttggttaggtatattcccaagttgtgttgtgttgtgttgtgttttgcagctgttgtaaaaggggttgagttcttgatttgattctccgcttggttgctgttggtgtatagaactattgatttgtgtacattaatcttgtatctggacacttgaattattttatcagttctaggagctttctggaggagtccttagagctttcaaggtaaacattcatattgtcagcaaacagtgacagtttgactttcctgacttggatgccctttttatctttctctcgtctgattactctggctaggacttccagtactgtgttgaagaggagtagtgagagtgggcatccttgtctttgttatgcatgcatctaagtgaagagacaacctgaacaggctaagtgtgagcaacaaggctgtgtattcacttgggtgtgagcgggctgagtctgaaaagagagtcagcgaagggtgatgggattggagctagtttttttttcttttttttattatactttaagttttagggtacatgtgcacaacatgcaggttagttacatatgtatacatgtggcatgttggtatgcacccattaactcatcatttaacattagatatatctcgtaatgctatccctcctccgaccccacaacaggccccagtgtgtgatgttccccttcctgtgtccatgtgttctcattgttcaattcccacctatgagttgagaacatgtggtgtttggttttttgtccttgggatagtctggagctagttttatcggttagggataagcagtggaaagtaacagtctgggaccgtttattgcgggcaggggaagaatgtcacatggtacactgtcacaaggtgggaggggtcacagggcacaatgccacaaggttgattgatcagttagggtagagcatgttacaatgatagaatgttgcaggttggctaatcagctaagacaggagctagctgtttttcttctgtggttttcctgttatcctagactttctggctccaagaggccttctggatgtgtacatgtgggtcacagaggtcaccatggcttgaccatggtgcatcctgctcagaagacctcagtcttattccagttctcaaagggaatgctttcaacttttccccattcagtattatgttggctgtgggtttgtcatagatagcttttattacatgaaggtatgtcccttgtatgccaactttgctgagagttttaatcataaagcattgctggattttgtcgaatgcttttcctgcatctattgaaatcacgtgatttttatttttaattcagtttatgtggtgtatcacatttattgacttgtacatgttaaaccatccctggtatgaaacccacttgatcatggtggattatctgacatgttgttggatttggttagctagcattttgttaaggattttagcatctatgttcatcaaggatattgctttgtagtttcgtgtgtgtgtgtgtgtgtgtgtgtttctgttacgtccttccctggtgttggtattagggtgatgctggcttcatagaatgaattagggagggttccttctttctctatcttgtggaatagtgt[273 bp omitted]tgctgggatcacaggcgtgagccatcgcgcccagccaccacttcttctttgaacgtctggtagaattctgtgaatccgtctggtcctggacttgttggtaatttttaaattaccatttcaatctcactgcttgttactggtctgttcaggatatctaattcttcctgatttaagctaggagggttggatctttctaggaatttatccatgtcttctaggttttctagtttatgtgcataaaggtgttccttatagccttgaatgatcttttgttttcagtgatgtcagttgtagtatctcctgttccatttctcagtgaggttatttggattttctcttctcttcttggttaatcttgccaatagtctatcaattttatattttcaaagaaccagctttttgtttcatttatcttttgtatttttttgtttcagtttcacttaattctgctctgatcttggttatttcctttcttctgctgggtttggggttggtttgctcttgtttctctacttccttgagggtgtgaccttatagtatcagttgatgctctttcagcctttttgatgtaggcgttgagggctatgaacctgttagcactgcctttgctgtatcccagaggttttgatagattgtgtcattgttgttcagtctgaagaattttttaatttctgtattcatttttgacccagtgctcattcaggagcaggttatttaatttccacgtgtttgcatggttttgaaggttccttttggagttgatttccagttttattccactgtggtctgagagagtgcttgataaaatttcaattttcttaaatttattgaagctcattctatggcctgttatggtctatcttggagaaggttccatgcactgttgattagaatgtgtattctgcagttgttggatgaaatgttctgtatagatctgctatgtccatttgttccaaagtatagtttaaatccattgtttctttgactttctgtcttcatgacctgtccagtgctgttagtggagtattgaagtcccccagtattactgtgttgctatctatctcattttttaggtctattagcaattgttttatgaatttaggacctccagtgttaggcacatgtatgtttagaattttgatattttcctgttggacaaggattatataattatataatgtccctttttgtctccttaactgctgttgctttaacgtttgtttcatctgatctaagaatagttacccctgctcgcttttggtgtccatttgcatgaaatgcctttttgtacccctttactttatgtgagtctttatgtgctaggtgagtctcctgaaggcagcagatggttggttggtgagttttttattctgcattctgtatcttttaagtggagcgtttggaccgtttacattcagtgttaggatggagatgtgaggtaccattgcattcatcgttctctttgttgcctgtgtaccttgggttttgttttttgtttttgctttttaacttatatttttgttttgtaagtcctgtgtgatttatgctttaaagaggttctgttttgatgtgtttccaggatttgtttcaagatttagagctccttttagtggagtcttggtaatggcaaaatttctcagcatttgtctgtctgaaaaagactgtatctttccttcatataaaatgcttagttttgctggatacaaaattcttggctgatacttgttttgttcaaggaacaaacaagggccccaaatcccttctggcttgcagggtttctgttgagaaatctgttaatctgataggttttccttcataggttacctggtgcttctgtctcacagttcttaagattctttccttcatcttaattttagataagctgatgacaatgtgcctaggtgaagatctttttgtgattaatttcctgggtgttctttgtgcttcttgtatttggatgtctagttctctagaaaggccagggaagttttcctcaattatgcacccaaatatgttttccaggcctttagaattcttttttctcaggaataccaattattcttaggtttgcatttaacataatcccagacttctggaggctttgttcaaatattcttttttctgtctttggtgg[132 bp omitted]acctccgcctcctggactcaagcaattctcctgcctcagcctcccaagtagctgggactacaggtgtgtgccgccacacccagctaacttattttttattttttatatttatttatttatttatttatttatttagagacggagttttactcttgttgcccatgctggagtgcaatggtgcaatctcagctcactgcaacctttgcctcctgggttcaagcgattctactgcctcagcctcccgagcagctgggattacaggcatgcaccaccacgcccaactaattttttgtatttttagtagagatggggtttctccatgttggtcaggctggtatcgaacttccaacctcgggtgatccacccacctcagccacccaaagtgctgagattataggcatgagccaccgtgcccagcctgtatttttagtagagataaggtttcaccatgttggccaggatggtctcgaactcttgacctggtgatcctcccgccttggcctcccaaagtgctgctgggattacaggtgtgagccaccgtgcccagcctgaatttctttcttctacttgttcaattctattgctgagactttccagaccatttcacatttctaaaaatgtgtctaaagtttcctgatttttttttattgtttttaagctatttccttgaatatttctccctttgcttgtatcatattttggatttccttgcattgggcttcacatttctctaatccctctctgattagcttaataactaagctcctgtattttttcaggaaattcgaggatgtcttcttggtttgaatccattgctggtgaactagtgtgattttggggggatgttaaagagccttgttttgtcatattaccagagttggttttctgcctccttctcatttgggtaggttctgtcagagggaaggtcttaaacctggccaggtgtggtggctgacacctgtaatcccaacactttgggaggccaaggtgggcagatcacctgaggtcaggagttcgagaccatcctggtcaacatcgtaaaaccccatctctactaaaaatacaaaaattagccaggcgtggtggtgcatgcctgtaatcccagctactcagaaggctgaggcagcagaatctcttgtgtccaggaggcagaggctgcagtgaactgagagcttgccactgcactccagcctgggtgacagagcaagactcctcaaaaaaaaaaaagaaaaaaaaacaaatatgaccccaccctacacagaagcagactgcagctgggaggagagcagcagctcacttgaggccatgctggggaatgagcatcacgatcttctttcccatgtgtgtgccccacaggctgaatcagtgccacctggacacggctggctgtggttttcttgcacttgcgcttatgggtaactcatggctgacgcacctgagccttagcatgaaccctgtggaagacaatggcgtgaagcttctgtgcgaggtcatgagagaaccatcttgtcatctccaggacctggagtgagtttcccatgggcgttgggtcaactctatcatactggggtctggagttcctgaaaggtcaagagataggagcagggagaccggaaccaaaaactgctttcagggtgagctgacactcatttttccaagggcaatctaggtaaactgaggtgttgacaccacggtgagcatgggaagggccgatggagcctcatgggaggaaccatgagttctgagaagcccttgatacctaaacactgtgcattcctcagaggaaggcatcttgccctaagttcatcttcagctatttatctgtatggagaagggagagtgcttgtctcttaatctctttccctctggggctcaaatttcttcaccctttgttgaaatgtttctattgaataggaatatcccattattaaacagactgtagaaaaagtaaaagagctcagtgagcaaaaatcgatcttcagtctcacaaccatgcagtcatccctgttagtggtttggatgtcttctggggttctcttgttctagatgcaagcgtgcatttgatgttttacaaagaaaggatcatagtagtcagcacttaatgcaacttaatgcgttctctttttttctttttgtttgtttgtttatttattttgagtcttgctctgttgcccaggctagagtgcagtggcatgatctctgctcactgcaacctccgcgttccaggtttgagcgatttttctgcctcagcctcctgagtagctgggattacaggcatgtgccaccagtcccggctaatttttgtacttttagtagagacggagtttcaccatgtcggccaggctggtcttgaactcctgacctcaggcaatccacccactttggcctcccaaagtgctgggattacaggtgtgagccactgcaccccgccaagcacttaatgcattcttaacatgtggcaggcagagcactaaatattttctatatctaatctcatgtagtctcaccacccccccatcatatccagtggagaactgaactcccaagaaaccaaaactttggcattggtctcacattgtgtctgaggatatgtctattataataaatgaagtacagtaaggtattccattgaatggtgtaggctttaaaaatctcctaaaatttaaaaatctcctaaagctggacacgtaccttatatctagtgttttcatcatgagcataaatgatttcattccaaacgcttgtatgcttggtagcatttgcttattcattacaaaggcagaattaatggaccacaagtggggtatcattttgagatctctcccttcccaagaataaaataaaggactttggtatggattctagttcacaaacttctgagtgcccccaagtattaattctaccatttgttttaattgtttcaagccctacttctgcatggtgtagaatcttagtcaattagagacatcatttttttgagatggcatttaagtgctgggagattaactggatctctccatcaccatttatccatgctagcgccaatgactaggtcacccctacctggtcttcaagggttggccctcacaactgcatccgttttttcttttgtttgttttttgctttgctttgttttggtttggatttttgtgtgttttgtttggttttggtggggttttgttttgttttgtttttgtttttgtttttgtttctgtttttgttttgagacagaggttctttcttgttgcccaggctggagtgcaatagcgcaatctcagttccctgcaacctccacctcctgggttcaagcaattctcctgcctc[135 bp omitted]tggcctcccaaagtgctgggattagaggcgtgagccactgtacccagcctgcatccctctttattcttcacccgatggctcctgaggatggaccatccccctccccagtgctatcatcctacccttagcctcccaagctgaagacagacttggaggccgtttcagtcatttctcctgcgataaaccattcagatgttatttatggggccacccaccccatcttccccatttttcctaagaatagaagcacaaaacttccccttttggattccagacctatcagcatttcagtaacttctgtccccttttctctccatcttggctctgtcagaatctttccagtttctcctcctcccccgtggagaatcttgacctcatctccaagtggaagcaaactctgctgtgctcatttcttttaaagatacctttagccaggtgtggtggcacatgcctgtaatcccagctactggggaggctgaggcaggagaattgcttgaacccaggaggtggaggttgcagtgagccgatatcgtgccattgcactccagcctgggcaacagagtgagactttgtcttgaaaaaaataaaaaataggctgggcgtagtggctcaagcctgtaatcccagcactttgagaggccgaggcaggcggatcacctgaggtcaggagtttgagaccagccttaccaacatggagaaaccccgtctctactaaaaatacaaaattagctgggcacagtggcacgtgcctgtaatcccagctattcgggaggctgaggaagggagaatagcttgaacctgggaggtggaggttgcagtgagccgagatcacaccattgcactccagcatgggcaacaagagcaaaactccatctcaaaaaaaattaattaaaaaataaagataccttcaatcacaccagacactttccccgcctccgctatcattcctctctcaagccaacagataccacgtggtctaagctgttcacaggagtggacaaaacagtggcccgtcaggaaggaataaaggaaactccagttaatgctgctgaaccttctcccgctgttccactttcctcgagagaggcagactctctctattccccgcctcttgcaggttggtaaagtgtcatctcaccgccgcgtgctgtgagagtctgtcctgtgtgatctcgaggagcagacacctgaagagcctggatctcacggacaatgccctgggtgacggtggggttgctgcgctgtgcgagggactgaagcaaaagaacagtgttctggcgagactcgggtaacttcctggggcgcctctttgcgggccgggctgggaggaggtgggggaccccagcatgaggttgcttgaacagggatgatgatgatctggtttccatgagtccctcaagttagatggagtgcaaccttcgcagcaccacagatctgggtataagttccagctcggctcctatggatgagacggatgaagtggcaaatgcttgggaacaaggtctggaggtagaaaaccctcaactgccgattgaacgacccctgcgtgctagtcctggtgctaaatggcggaagtatggaagtgaaaagacctttgtgttgtagtgtgaacagtctagagacaaagacgggcagaaagcaagtgattacctgagtggtccttaaaacttcagtgagcatcagagccagccaggggcttaagacagagctccaatatagtggactatggttcagccatgaaaagaaaagtgctgaggctgggcacaggggctcacgcctgtaacaccagcactttgggaggccaaggtgggcagatcacttgaggtcaggagttcaagaccagctgggccaacactgggaaaccctgtctctactaaaaatacaaaaattagccaggtgtggtggcgcatgcttgtaatcccagctattcgggaggctgaggcaggagaatcacttgaacccaggaggtggaggttgcagtgagccgagaccacaccactgcactccagcttgggtgacagagtgagactccatctcaaaaaaagtgaaaaaaaaaaaaaaaaacgtgctgatacgttccaccacatggatgagccttgaaaacgtcgtgctgagtgaaagaagccagccacaaaaggtcacctggtgtataattccatttgtataaaatacccaaaacagtcaagttcgtacataaagtagaggggttgtcatggctagagggaatgggaagtagaaggggggcagctgaattggtatggggtttccttttacggtgatggaaatattctggaagctagcagaggtggctgcagcgcactgtgaactactctagaatggaatgtttaccatgtgtgagcactgaccatgcactagtcttgtatgtgtgctgcttataaccctccatggcactaggggaggt[137 bp omitted]atctccgccttccgagttcaagcctcagcctcccgagtagctgggactacaggtgcctgccaccatgcccggctacttttttttgtatgtttagcagagacagggtttcaccgtgttagccaggctgcttttaaacttctgacctcaagtgatccgccggcctcagcctcccaaagtgctgggatgacaggcgtgagccaccgcgcctggccgggacccttttccttcttgaagtcacacattgttcttcaagctcatcacaccttggttctctgtcccctcaacttctttctacgtggtcatgtcccttctttagttcctcttcgatctagctttgtgttttatttttatgattttattaaactttatcttatttcttattaaatcaaggcttacttatcttactataataccatcactcatcttttagctccatgttctatttttctttctctgtcttttttttttttttttttttttttttaagatagagtcttgctctgtcccccaggctggagtgcagtggcgcgatctcagctcactgcaagctccgcctcccaggttcaccccattctcctgcctc[134 bp omitted]ggcctcccaaagtgctgggattacaggcataagccaccgcgcctggcctgtttttctgtcttctaaatgcagtgtctcccttagccttctgttctggggtgtgtccacctacaaacactccaagcttcactgaaccgcactctccaccctctctgctctttggtagctgagaatcacaggatcaaaacaggcaatggcgagttgctgttgtgtgcagtcagggatcatggatgtaaatttgttttcccagcattagttgtctggtccactcgttttccccaccacctgagtcaatttcacaacaattcattccctggagacatgcgcacctaccttgttctactgggtgcttcacaaataactcctaccccttcaaataatataaaatcatttactaggaaagccctaaatcttctatcaagaagccaactatgatctgcaccagtacacacttcctcctgtaacaataaagaaagcatggccgggtgtggtggctcatgactgtcatcccagcactatgggaggctgaggggggtggatcacctgaggtcaagagttcgagaccagtgtgccaacataggaaaaccccatctctactaaaaatataaaagttagccgggcttggtggcgtacgcctgtaatcccagctactcaggaggctgaggcaggagaatcactggaacctgggaggcggaggttgcagtgaaccgagaacgtgccactgcactccagcctgggcaacagagcgagactctatttctaaaaaacaaaagcatccctgcggtagttaatttaacccatgttaatcagaggttagtttcctccacgatgggaatcccacaatcatccgtgtgcagcaccttataccatcactgatttacctctcccttgcctctatcctcagcctccctactggatgttttgtctttataaatgcttagatattattttagaagcaaaatgaaaaataagcattcaatcttatctcaccatctcgccataggtggctaaaacaacttgagctgcatctcattaactttttattctatcataagaattccagccgggtgcggtggtgcacgcctgtaatcccagcactttgggaggctgaggccagtggatcacttgaggtcaggagttcgagaccagactggccaacatgatgaaaccccgtctatactaaaaatacaaaaattaggcatggtggcaggcgcttgtaatcccagctactcaggaggctgagtcaggagaatcacttgaactggggaggtggaggtcgcagtgagtcgagctcgtgccaccacaccccagcctcagcgatagagcaagactcagtctgtgcattttggattttttctttttcaatctagaatgattaggacatgtaaaacctatatacccaccacctaatttaaacaatcattagtattttagtatatctggtgaactatttcagagcagcttacggattttgacatccaccccaaaataaccagcgtgctcccttcaaaatagaacacgcctataaaatgccattattatattcaatgaggtcccttggctttctgttgctcttaagatgaaattctaaacccttagtatgacctaggtgcccagcctccgctctcaccactgtctgggactcttttctagccatctagtcatctttgtttctcaaatgtgtctcctttccgcaagcacagtgtacaggtgatttttttatatcaatgcatatgtcaatatgtccttccgccttctcacctttcttcaggtgcagtgttgctttctctgcaggtctgtgttccttgttatgtttccttgctacaggcactctcagcctttctttcattgttttccacaactataatttgagttacccaccatctctcaaagtgagaaccaagcacagtagcctcacctgggaactcgttagaaatgcaaatatttggccgggtgcagtggctcatgcctgtaattccagcactttgggaggctgaggcaggtggatcatgtgaggtcaggagttcaagaccaacctggccaacatgatgaaactctgtttctactaaaaatacaaaaaattagccaggcatggtggcacgtgcccataatcccagctactccggaggctaaggcaggagtatcgcttgaatcccagaggtagaaggttgcagtgagccaagattgtgctactgcactccagtctgggcaacaagagtgaaatgctatctcaaaaaaaaaaaaaaaaggcgaatatttgggtctttcatcagaacaactaaaccagaaactgggaggcagagcccaccagtttcattttttgtttgtttttgttttgttttgttttcccaaagaaaaagtatcaaggtgaaattcatacgggttgaatgaagggtccatcatcgatctttggggttattttctgggtgtcctgaccctgcaggttgaaggcatgtggactgacttctgattgctgtgaggcactctccttggccctttcctgcaaccggcatctgaccagtctaaacctggtgcagaataacttcagtcccaaaggaatgatgaagctgtgttcggcctttgcctgtcccacgtctaacttacagataattgggtaagtcgccagcaattgtcttctgagatacagacctgcttctgttccaggcttgttagctggtggagaagcagtttatgggaaaagttgacgtcataccttgggagccacattttactccattggtgagtgcccactacgttctgagtaccatgctggatgctggagatacaggaatatgggagatagaggccaggtgcctgatatcatggagttcacttctgggtaggttgggaagggcacagaaagaacgttataaatgtttatgctgaaaaaactagaattgctatatgatccagcaatcttacttctgagtatgttacccaaaagaattaaaaggaagatctcagatttcacacccatgttcatagtggcataatgcacaataatagccaagaggtggaagtaacccaggcgctcgtggatgaaaggataagcagaatgtggtgtataccaacaatggaattgtattcagtctcaaaaagaaaattctgacacatgctacatgatggaatcttgacatgccgagtggaataagccagtcctaaaaagacaaatactgtaggattctacctcgaagaggtacttataagagtgaaattcatagagacagaatggtgatttccaaaggattggggtgaggggttggggagttgtgtaataggtgcagagttttagttttgcaagatgaagaattctggcgatagatggttgtggtgatgcttgcacagccgtgtgaatgtagttaacagcactgaacaattcacctagcaggaagtttcttcagtagctcacacacatcatttcagcttcccctctcattcagtccttgtacaagtctggagggctgagttgatggagttcacagaagttcttcaggaccatctcttaagactagaagtttctttcatgacaaagtggcagttcactgatgtcttcagtgtttagtggtagaaaaagcatttgtcatttaggagctcatatccgtagactaacaggagttcagagacttccctgagcatgaaggaacacagttgtacttgaagggagtaaaatcttgaccagagaaatgtacagctggcagcattgatagcccatttgaggttggttgtggtatatttattttattttaagttttttgagatggagtctcactctgttgcctccaggctggagtgcaggggtgcaatcttagctcactgcaacctccgtctcgcaggttcaagcaattctgctgcctcagcctcctgagtggctgggattataggtacgtgccaccacgcccagctaatttttacatttttagtagagaagagttttcaccaggctggtctcaaattcctgacctcatatgatccaccagcttcagcctcccaaagtgctggatgacaggcatgagccaccacgcccgacttccttgtggtatatttatatcaatagaaaatttctcagttgagtaactgttttctccagtatggtccagctgatggcagttgagtttatccagggttcaagttatggcacatgggtataaccaggaagaagtcaagagtggctgtggtagaccctggaatcataggaggaaggtgaagacaggatgaggaaggtgaattgagaaacatggctcaatgaatctgggagtcttggtttggtcaggactgttacagtgacaaaatgagctgaaaaggtggagtgctgttgaaagaatgtgtttatatccttgatttatgaggcactatagccattgacaagatcagtggtgactatgggacttagtagttgaagtaggatagaagtcagacctggatttactgattgacctattatgggtctatttccccatctgtgaaatgggggcggtgctatgtatctatttaaatatgtttatttctcctctagtagactataagcttggtaagggtgggaaatttgccttgtccatccctatatgagaagtcctcatttaatgtcattgatacattcttagaaactgtgactttaagcaaaacgacatataatgaaaccaatgttttctcgttgttatagcaatgactctgaagaaaatgacgttcttcgagaatctgctctagtagttttgcttaaagtcactgtttccaagaacctatcaatgacattaagggagaacttactgtacctccccaaaccctataacacgacccggcacagagactctgaggaaggaattcatggatggactgaaaggtcatgcctgcatcttaggactgttaggactgttgtaaggaacagatgcctttaaaagctcagcatagtatctgacatatccaagtttttttacatgcagagaattacttttattctatagggaacatgctactgttatcaagcaaaagtggctcactgcctgatgtgctagaggccaatactgtgacactggagatttgtcgggggaaaaaagccctatattgcaggtcaactcacaaggagacaggagtcaagctcaaatctgtctccccatgctggcttcaaggcagcattattattagaaaaggttcagggagtagatcttgagattagtaggtgattggaagaaaagaggagatctagaaagtcactgggcatgcataattatctattcatgctacatcatgggttgcatgtgccaatttagggagagttagtataaaacatggtggaaattcaggctgtgacatcagcaagctcattctgtgcaaactccagtctgccatactttttctaaccgatttcagccagttctttcataagtggagggggagtctccatgtttcagcaagctgtttcttttcttgtctgccatcctacaaactcaataatttgttagtcattggtttaactctttggggcacgttccttaagagtacaagaaaaggtttgagatccttgatgaggctaccaggaattttgaagaagggagaagagtcgaaagcaacatctcagtaacgagtcctctctctgcctccccaggctgtggaaatggcagtaccctgtgcaaataaggaagctgctggaggaagtgcagctactcaagccccgagtcgtaattgacggtagttggcattcttttgatgaagatgaccggtactggtggaaaaactgaagatacggaaacctgccccactcacacccatctgatggaggaactttaaacgctgttttctcagagcaagctatgcacctgggagttccttctcaaagatggagaatgatttctgattctcacaaagccctcaatggtagtgattcttctgtgttcactctacgttggttactggatttgaaggctagagaccttcaagtcataggactcagtatctgtgaaatgtccgtcatatctcagagcatatagagggaattaaataaacacaaagcatttggaaaagttgtcaagtggttttcttaactagtggggatatggtttaggagcagagaggttgggaggacctagatcttcaaaagcagcccctgaatttgggtaccacaactagtggtggttttttgttttttgtgtttttctttttgttttttgttttttttttttttttgagatggagtcttactctgttgcccaggctggagtgcagtggcacgatcttggctcactgcaacccctgcctcctgggttcacagcattctcctgcctcagcctcccaagtagctgggaccacaggcacccgccaccacgcccggctaactttttgtacttttagtagagacagggtttcaccatgttggccaggatggtctcaatctcttgagctcgtgatctgcctgcctcagcctcccaaagtgctgggattacagacgtgagccactgcacctggccaactactagttttttaaagcacatacctgaataccaaaggatggtgttactgtcactcaatatctgaactataaacataaagccgaatttattccttagtgtaatgaaaagctggtctaccacagtatctctgagtagagcagacttctgatctttgtggggaggaatttggggaggtacagaatgaggctaaaccttgaaggtgtaagttggcctgtggttactcaggtgaggctgattggtagaggtgtgttcatcagagtgcatcccttctgactggctgaatttccaatgcaaagggcagctgttgattggcttgcaaaagcatgttcactgaggtaagttgtcttggatccatttaatggatttaaacctgtctaggtagctacttattaccatggctacagaaccatcagtctattcctagaagagtggaaaactcttacattcttaccaaaatatacttcttatgatttcttgtatttatttctctcatccatgatgacgatgatgaatgatgataatctaacacagccctgtataccatgccctgtcctaagcagtatgaattaacttatttggtctttacaacaccttagaggtaagtatattttttgcttccatcttacagatgaggacattgaggtgcagaaaataatgcacagcaaggccgggcggggcagctcacacctgtaatcccagcactttgggaggctgaggcaggcggaacacttgagatcggtggttcgagaccaacctggccaacatggtgaaaccccgtctctactaaacatacaaaaattagccccgtgtggtggttcatgcctgtaatcccagctactcgggaggctgaggcaggagaatcactcgaacccgggaggcagagcttgcagtgtgctgagatcatgccactgcaatccagcctgggtgacagagcgagactccatctcaaaaaaaagaatgcacagccagtaagtagcagagctgccattcagacccaggaaatccatttctggagttcattctactcattgaaatgttgcctctaccatacaaccaccttccacgagccattcactgtactgtgtgtaaacctctaactccagcagcccctttcaaaccgggggaatgttctagcatcattccctgtcagcgtatattagacaggggctggcatgcccccttttctgctcccattgcaatggagctaataaagtttatatcagatataggaggaacgtcaactctgcagtttatttgtggttatagtattagcattatcttcaacctatggtttctttgcaggaatactttttaaatacttgtgtgttctgggagtgtttgtttataaaatacttggacattggaccaatgtgatagggtttacgaggtgaatgggtgaagtagtgggggaaaagcccttccgaatcagagtatctgtcttcaggatacctcttctcccacatgggacacaggcccatctaacataaagacagggcaaggaggccgggtgcagtggctcacgcctgtaatcccagcacttggggaggctgaggtgggcagatcacgaggtcaggagattgagaccatcctggctaacacggtgaaaccccatctctactaaaaatacaaaaaattagccaggcgtggtggtgggtgcctgtagtcccaactacttgggaggctgaggcaggagaatggcgtgaacccgggagacggagcttgtagtgagccaagatcgtgccactgcactccagcctgcacaacagagccagactctgtctcaaaaaaaaagggggggggaggggggcaaggaaaccaccattaatgtttgtgttaacaaagcattactatgttagtcttgttaaagatctatcaccttgtatatagctaaaaatacacaatgccctcctgtgtccagtgcattatcttgagcactgctgcctaccccacccccaacagttacaaatatcccactttgtaaagttacagccaaagggaaggtcaaagggaaaagccaagtttagaaacaatatttttattttttagaaacatctcattatcttgcccaggctagtcttgaactcttgggctcaagtgatcctcctgcctcagcctcccaaagttctgcaattacaggtgtgagccactgtgcccagcttcaagttttttatgctgacctgtgttcaaattctggctgtttcgaatgatttttatgacactatacaaatgtcaacctccatgggcttttgatttcttatctgtaaagtaggaaaaattgtacttaccctatagaatcaagaagagatgaatctctgtaaatcagctgtagaagtggctggaacattcactccaccaatatttacctacttgtattagttgtttgttgctgtttacaacattaccacaaactcggcagttaaaacacgtgatctcggtgtttgagtccagatatgactcagctggatcctctgtctcagggtctcacaaggctgcgatgaaggtgttgaccagggctgtggtctcatctgagacccaaccgggacaaggacctcttccaagttcatgcaggtcccaggaacatccattttcaggctgctggactgagggccttggtttcttgactgtcagccccaggccatccccagctcttttctgcttggccgtctccatatggcagattggatcttcaaagccagcaaaacagtcactcagcaagacagacttacaatctcatggcatcacagaagtcagatcccatcaaccctgccacattccgtttggatagaagtaagtcacaagcccctcccacacttgagggaaggggatctggcaagatgggaacaccaggatgaggatcatgaaaccgcctagaatctgatgcactactccacactggcagaaagctgtgttctactcactgctgcctgttggaaaagagtttctttctcttgagcctcttggccatttccaagggtagagggagttacccaggtgctacggctaggagggaggaactggaccttctaagtgctcttcacaagcctcctgtctccagatgtgtacacactttcctctttcatgcagcaagctttgctgagggtgggatgggtgggcggaatactgattgtggcgaagtgctaggaggctgcagatacagaccacttgcctcagagtc[132 bp omitted]tgcaacctccgcctcccgggttcaagcaattctcatgcctcagcctcctgagtagtggggactacaggtacccgccaccacgcctggctagtttttgtatttttagtagcgatggggtttctccatgttggccaggctggtctcgaactcctgacctcagttgatccacccgccttatcctcccaaagcactgggattacaggtgtgagtgaccatacccagcctggcctcagagctttgaataatagggatgataccttgatttctacccaactccttgtttcttattctaaattcctaaacgtagaggatgaagtaatgatgagtctgtataaaccctataaccctatgtgctggccgctgccctcaggctgatagtgcaggacaaagatccctgttctcctaaaatgtattaccttctaatgaaggacaaatgcatgaattgcagctgttctcacagctaaaatggcaggttcgcaagagactaggactattctatttttctagactagctatctttgaggtctgagaaaaacttttttctgcactgctggtttttcgtcaagtttgggacatgacataccatgaaaatgtacccttcctacatagtttttcgttttgtcttgttgtttgtttttaacatttgtaccacggggagggaagagcatcaggaaggcaacggacccggtcctggagggcaaccgtggggagtcccaggcccccgctgcctggtgcatcacatcgtgggtaggacaggtgggagcgctgtctccctgctgatctgggctcttatctctatgaggaaggaccctttcctcacccgtgagtcaaacgatagagaattcacctccacctgccagccacgctgtagctggggtgtgtgtggagccgcacaaactctgatgctttgagctgcatggcacagaacgtccacctgagatcactgcgtagaagcttcctgggaaggcaattccagggtcagtgaaccccgcgggacgccagctccctggttgagtttcccctgatggccgctgggtggcagcagagcgtcatcttccctgagaccctcccgggagcagggcgggctcctccccgcatccccactgtggattttctcaccgcaggcactgctgacggtgggaccggccacttccacatcggggtcccgcctgtgggctgtagggtgttcagtgacgtccctgcttttacctgccaggtgccttccctcccgcagttgtgacaaccaagaaagtcttcagacacagccggatgttacccggggcaccagcctgagacccgctggtccacgggaagcagggagccctccctcaccagcacacccagcggcctccccttcccctcgccggacgcgactggctcacaggaaatccgtgtcagccctgctcagaaggtatcagccacttgttggttctattggaggtgacagctgcttagcagacacccaagaatgtaggtttgttctttagctttattccccattgtcaaaatggaatcaaccaagattatctggaggcccaggtgtaaaatgaaaatgtgggtgctttgttcaaaaattaagaatttcaagatgactgtgagtcactatactgagtgcaaagccattctgagccggggtcctggatgaatgacccaagcagctggcctccattgcagctgactggaccaggagctagcgtttgaagaacagccagtctttaagctgcctaatgacctgtaggccgcctgtgaccaaggtaagagatgaagtaggtatccttgttcacaacagccaaaaggtgcagacaacccacgtgtctatcagcagatgaatgggtaaacaaaatgtggtctatccacacaatgaaatattattcagccatgaaaaaaagaatgcaggctgggtacagtggttcatgcctgtaatcccagcacttagggaggctgagttgggaggctcacttgaacccaggaatttgagaccagcctgtgcaacatggcgaaaccccgtcactactagaaatactaaaaattaaataggtatggcggtacaagcctatagtctcagcccgttgggaggctgaggtgggaggatcacttgagcctgggaggtcaaggctgcagtgaaccgagattgtaccactgcagtctccagcttgggtgacagagtgaaaccctgtctcattaaaaaaaaaaaaaaaacaacaggtgcagtggctcattcctgtacttctagcactttgggaggctgcagcaggcaggtcacctgaggtcaggggttcaagtccagcctggccaacatagtgaaacctcgtctctactaaaaatacaaaaattagcccagggtaatagcgtgtacctgtaatcccaggtacgcaggaggctgaggcaggagaatcacttgaacccaggaggcggaggttgcagtgagccgagatggcaccactgcactccagcctgggcaacaaagtaagactccatctcaatttaaaaaaaaaaggaataaaggaatatagtagcgatacgtgctacaacatggatcaacctcataaacattatccactgtaaagaagccagatacaaaaggccacttgtatgattccattgatatgaaatgaccagaagagggaaatccacagagacacaagatgagagtttgcccagggctgggagaggagcagggaatgagtgactcttcctggcacggggtttccttttggagtgatagacgtacaactatgtgaatatactaaagcattatttaattgtacaccttaaaatgggtgaattccatggtttgtaaattattttttaaaaagcaaaaaatgatgaaccaatatagttgcctccatctgagatctgattcagaattcctgaggaaataaagcagttaaaaggcaggaaattaggctggaaatttattagtgaaagtggaagatgtggtttgcagagtggagagagctcagggctgtacttttatgcagggggtgttatcagcacagtatccagggcttgtgaagttttcattagcctgaaaatatcttagaaacctggcagggtgtggtggctcacgcctataatcccagcaatttgggaggccaaggtgggtgggtcacttgaggtcaggagttcaagatcagcctggccaatgtggtgaaaccccatctgtattaaaaacaaaaaatttagctgggtatggtggcaggcgcctgtaatcccagctgcttgggaagctgaggcacaagtatcacttgaacccaggagacagaggttgcagtgagccaagatcatgccactgcactccagcctgggcaacagagtgagactgtctcaactggggagagagcaagcttcaggttcctgagccccacggccaattctggtatggcgggacccaggtgaagcctgggaatatgaattttaaaaagctttcctaagccattctgatgcaagtgctcttcagatcacactctcaaagccagaactgcaaaaacgaagctctgagtgtaccacaagtgttggtcagagagaatacgggctggagggtgaggaccctgtttgatggagacagaaaagagaaggaaactctggaggagaagagcgaagacaagtcctgactaagaccataaaccaggggttggcaatttttttctgtaaaaggccaaataggccaggtatggtggttcatgcttacaatctcagcactttgggaggccaaggcgggagcatcacttgagcccaggagttcaagaccagcctgggaaatgtagtgagactctgtctctacaaaaaataaacttgaaaaaaaattagccaggtgtggtagtgcacgcctgtggtcccagctactcaggaggctgaggtgcaaaaatcacttgaccccaggaggtcaaggctgcagtgagccatgatcgcaccactgcactccagccagggcaacagagtgagatcctgtctccaaaaaagagccaaacagcaaatattttaggctttgggggccatttagtctattgtaactgctcagctctgctgatacagggtaaaaacaagcataggtctattgtaactgctcagctctgccgatacagggtaaaaacaagcatagaaaatacaaagagaattttgtcacatgcaacatggatgaacctggaggatattacattaaataaaatgagccaggcacaggaagatacagatggtccctgacttgtgatggatttgaccttacttacactggtgtgaaagtgacattcgttcagtaacaactgtccttcgagtacccacagaaccatctgtctttcactttcagtatgccatcaatcacatgaaatagtcaacactttattataaaatggactttgtgttggatgattttacccaactggagaataatgtaagcattaggagccaggtgtaaggtagggtaggctaagctatgaccttctgtgggttaaatatattaaatgcatttccctagactgggcaacatagagaccccatctctaaaaaaaaaaaatttgttttttaattagccagacgtggtgcacacctgtagtcccagctactcaggaggctgaggcaggaggatggtttgagcccaggagaccgagactacagtgagtcatgattgtaccactgcactccagtcatggtgacagagtgagacactgtctcaaaaattaaaaagtattttcaacctgtattttcaacttatagtgggtttatcaggacgtagccccgttgtaaatggaagagcatctgtattgcatgatctcagttatatatggaatctaaagtcaaactcacagaagcagagagcagaatgatggttaccagaggctgaaagtgatggggaggtggagtctggggaggtgttggtcaaaggatataaatgttgatgttacaggaggaataagttcaggagacctattgtcgtacaacgtggtgactatagttaacagcaaaatatcacgtacttgaaacttgctaagtaagtagatgttaagtgtttttttgttttgttgagacagggtctccctatgttgcccaggctggtcttgaactgggctcaagggatcctcctgcctcagcctcccaaagtgcagggattacagtcacaagccaccacacctagccctgatgttaaatgttcttaccacaaaaaaaaaaaaaaaaaaaaaagcatgtaaggtaacgtacaagttaatcagctcaatttagccattccataatgtatacattttttttaatggagtattgctctgtcacccaggctggaatgcaatggcaggatcttggctcactgcaacctctgcctcccaggttcaagcaattctcctgcctcagcctcccaagtagctgggattacaggtgcccaccaccacacccagctaatttttgtattagtagagatgaggtttcaccatgttggccaggctggtctggaactcctgacctcaggtgatccatctgcctcggcctcccaaagtgctaggattacaggagtgagccaccacacctggctgtaaacatatttcaaaacagcagattgcacaccataaatatatataatttttgtccatttaaaattttttaattaaaaaaatataaacattttgaagaaaacacaaaagcaaatgggtgtggctgtgttctcatgaaattttattttcagaaacaggcggctggctccatttggcctttggggcattttgctgacccctgctggagatgaggatcttgcagaccagcttgtctgtgtttcctgtttgtcctggactgactgttcctctgttacctgcatttctgtaagggttatgagctgggtgccagggatcagtggtgcaatcctggaaaggagcctcctggcagcttgaacggttgagggtacacaggaccgctcaggttaaggccctagcccaacctcttgccaaacccgccacacactggacctgcttgtctgtgatagtaggttttatatatcaacatgcctgagccacggggttcccagattaagcattgtttctgagtgtgtctgggagggtgtttctggttgagattactgtttgaattcgtggacttagtaatgcagatttccctcccttctgtgagtggactcatctcatgagagtctgaatagaacaaaaaggtgtagagggagtcatttaccctgtttgctccccgcctgcctgttggagtggggacgcctatcttctcccgccctggaactgggatttgcacccttggctcctctggttctcaggcctttggacttggactggaaccaccccacaggcattcctgtttctccagcctgcagacggcagatcgtgagactcctcagcctccacaatcacgtgagacaattctcatcataaacctctttctctgttctgagaactgcatcatcagtcgtgtgcaaatatcaagtgtatttacacaaaactagataatacagcctaccatacacctaggctatatggagagaagtggcataatcacagctcactgcagccttgaactacagggctcaagccatcctcccacctcagcctcccaagcagctgggactacaggcatgtgccaccatgc[133 bp omitted]gaaaaccccatctctactataaatataaaaagcagctgggcatggtggcgcacgcctgtagtcccagctacttcgaaagccgagggaggagaattgcgggaacctgggagacggaggttgcagtgagccgagattgcaccactgcactccagcctgggtgacagagcaagactccgtttcattcattcattcattcattcattcatttagagacggagtcttgctgtgtcacccaggctgaagtgcagtggtgcgatctcagctcactgcaagctccgcctcccgggttcacgccattctcctgcctc[209 bp omitted]ggactctcgctgtattgcacaggctggagcctatttgctcttagagcctattgtttttaggctaaaacctggacaacatgttactgtactgaatactgtaggcaacggtaacacaacactaagtatttatatatttaaacgtagaaaagttacaacaaaataccaaagaaaatatttgaagatggtatacctatatggggcacttaccatgaatgaagtttgtagacatggaagctgctctgggtgagtcggtgtgtgagtggtgggtgaatgtgaagactgggacgttactctacactgctgtagactttataaacactgcacacttaggctaccataatttataaaatatttttctttcttcaagaataaattaaccttagcttactgtaacatttttactttataaacttttatttacttatttttgagacaaagtctcactctgtcgcccaggctggagtgcaatggtgtgatctcggctcactgcaacctctgcctcctgcgttcaagcgattctcctgcctcagcctcccgaatagctgggactacgggcacctgccaccacgcccagctaatttttgtatttttagtagagatggggtttc[132 bp omitted]actctcgtaataacacttagcttaaaacacaaacatagatcagacacgatggcttacacctgtaatctcagcacttggagagactgaggcaggaggatcacccttaggagttcaagaccagcctgtacaacatagaccccacctctacaggaaataattattttttaattagccgggcatggtggcacatgcctatagtcccagctacttgggaggctgaggtgggaggatcgcttgagcccagtagttcaagactgcagtgagctatgttcataccatgctctccagcctggacaagagagcctgactgtctctaaacacacacacacacacacacacacacacacacacgcatgcacacatgtgcattgtgcaactgtatagaaagattttcttgctgtacatccttattctataatctttttcctaatttctttaacgttttaatttttgattaagaaagacacacacacacattagtctagcctgcacagagtcaggatcgtcaagatccttctcttctaactccgtatcttgtccccctagaaggtcttcaggggcagtgacatacatggggctgtcttcttctatgacaacggttcttctgggttcctccagaaggacctgcctgaggctgctctacaattaatcggtttttttttttttgtaagtaggagtatgctctaaaataacgtttaaaaattatagtatacccaggggccgtggctgacaattataatcccagcactttgggaggctgaggcgggcagatcacttgagctcaggagctcaagactagcctgggcaacatagtgagacccatctctaccaaaaatacaaaaaaattagccgggtgtggtggtatgtgcctgtggtcccagctactcaggagactgaggttgggggatcgcttgaacctgagacgcagaggctgcagtgagccaagattgcgccactgcactccagcctgggtgacaaggcaagactccatctcaaaaaaaaaaaagtatagtaaatacatgaaccagtaacatagtcatttattaccattatcaagtactaagtgctgtacataattatatgtgcaatggcgtgatcttggctcactgcaacctctgccttccaggttgaagcgattctcctgcctcagcctcccgagcagaatagctgagactacaggtgtgcaccaccatgcgcggctaattttttgtttgttagttttgtgtgtttttgttgttgttgttttttgagacagaatcttgctctgtctcctaggctggagtgcagtgacaggatctcagctcattgcagtctctgcctcctgggttcaagcaatcctgcctcagcctcctgagtagctgggattacaggcacgtgccaccatgcccagctaatttttttatctttggtagagatggggtttcaccatgttggtcaggctggtctcgaactcctgacctcaggtgatccgtctgcctcagcctcccaaagtgctgggattacaggtgtgagccaccatgcccagctaatttttttatttttagtagagacgggatttcaccttgttggtcaggctggtatgtgcccaacttttataccattggcagcacagttggcctgtttaccacatcaccacacgcatgtgagttgtgcattgcactgtgatgttacaaggcctatgacagcaccaggtcgaagacattttccagcagcataatcttatgcgaccatcatggtccgtgcagcccattgtttggaatgtcatgcagcacatgactacacgcacacatacagaatattgattctgcttctcgaagaaccctaatgcattttccacactggcagattgtctgtcttctaagctacagcagcaaccaaatatcatgaatgctttttgggttcctaactctagttgggagtcccaagtgacttactgtggttaagcccccagaatgagttgtcaaggttcaggctctgttgatgatgaggaagaagaaccaggaccacctaccagttacctctatttgacagtcacttggctcagttctttggcttgggggtgtgtgtgtgtgtgtttgagacagtcttgatctgttgcccaggctggagtgcagtggtgtgatcttggctcactgcaacctccgcctcccaggttcaagcgattctcctgcctcagcctcccgagtagctgtgattacaggtgcatgccaccacgcccggctaacttttgtatttttagtaaagacagcattttgctgtgttggcc[141 bp omitted]tgcgagataaacatcatttaccatctttaaaggacgaaaaagctggagctcagaaaggttggtctcttgaacaggatggtaagactcgtacgttgctgaccaggaccctaaagtttttcccctaccaccaccatatactcttcatgagccatcctttcccaaataacctaaacacacacacacataaggaaacagcacttgctatacaagcaagtccagcttcaagacaagccccaggctccgctcaccatgcagaatgctgggcctaagctcctcctgtgtggaatgctgaagaaatcaccacccttgatgcaaaacgaggcctgtctcaaatcagcttgtggtgactgaggcaaaggtgggaatggggagtgactgtctaatggatacaaggtctcctttttggatgacaaaaatgttttggaactagacagaaatgatggttctacaacactgtaaatgtaccaaatgctaactgaattgtgcactttaaaatgggttcattttgttatgtgacttttaccagatgaacaaaaacactgtctatctaacacagatccatgcctttacatggtatgttatataataacactttaccgtcctttatccaggaccacgacttcatttcacagacactgcagttctcaagaatccaggtggtggcagcagagagctgagagaaaccagcacttccctaccggccctaaggaaggtccggaataagaatattgaccttgcccagttgcagtgagcatttctgtattgcaccagtcacagtggcgaatgcagctaaggagaggcaggtagatggagccacagaaccagatgtggtctgggcagtgtttcatcccaccaggaatgacagtgcatctgcagctcccagagggctctctgacaccctacctccaactgtgagcaatcatctttacctcctcatccagaggaaggaggccagcgggatgcagagcctcagcagcttcagcccaggctcagggctgaagtggagaagcatccaggccagttctggcattggtggaaccagctgggccgggggttgccccaggtaaaaggaacaggacccatcactgagaccacaggacagagaacactgagaatatagactcaggtgagatgcacggttgaggctcgtttggtttctgagaaccagcatgttggattatacccagaataactaatcctttgcccaattttcccattttccctcccagacacaaaataggacttactttccggctccctgaaagctgggcatggccatgtgccttgctgtgggggatgaacccagagcagaagaagtgtgtgtcgcttctggctggagacttcaagagcagtacacgatttgccaagtctctctgcctggccacggcaaatggtgagtcccagagagttgacaacgtggagcagagctccccgcaacccatggcaggcacggaacacaaacaagataaaatgttgagtgttgtgagcccctgacatgggggctgtttgcttgcagcataaccggtcctatcctgacacacgcttggggttgggggtcacaaactcaaatgccaggcaggcgatgtgagggaccacgtgggaaagagtgggtgaggacttgttcaaacacaggtgacaggctgggtgtagcggctcacgcctgtgatcccagccctttgggaggccgaggcgggcagatcacctgaggtcagaagttcgagaccagcctggccaacatggcgaaacctcatctctactaaaaatacaaaaattaggccagatgcagtggctcacacctgtaatcctagcactttgggaggctgaggtgggcggatcacctgaagtcaggagttcaagaccagcctggccaacgtggtgaaaccccatcatctctactaaaaatacaaaaaattagccgggcgtggtggctggagcctgtaatcccagcgactcgggaggctgaggcaggaaaatcacttgaacccgggaggcagaggttgcagtgagccgagatcacaccacttcactccagcctgggtgaaagaagctccatctcaaaaataaaaatttaaattaaggcagatgccgggctgtttaccagtccagcttttctgtacctcacctccgatttctgtacatctttcccttttttatgtctacagatcttgcaccacatggtcgcgctggagtctctgtgaatcggctgtgattctgggggctgcgtgattcgcgaatcattcattgctccattaaactcctttaaatttaattcggctgaagtttttcttttatcagagaggagacatgtgagacatgttccttctctctctgcccaattttcctgttttccttcccaggaggacacagggagaaggccaccgtccgcacgctgggaagcagccctcaccagacaccagacatgccagcaccctgatcttggacttccatcctccagaactgtgagaaattagtgtctgttgtttaagacacacacactacgtattctcttagagcagcctgaacagactaagcaggggtgtccaaggtagagaatacagtcataggttctcagtttctgtttgcggttggaccagtaaagacccttcctcatccctcttttccacttatcactagagacagaaactaaaatccatgatttcaggctgctaaaagcctaaaacagaacagcaacaaaataaggtgggttggacgagcttggtctacagcagtatgttttatttggttctcatggaggtattccactgtttttctttcaacatactgttgctggcttgaatcatggagatattaaggaagaaagtctaataattatgatgttacatgttactaaatctgtcttgccagcttctctatttaaaaaaatatatatatcaggccaggtgcggtggctcacgcctataatcccagcactttgggagactgacgggggcagatcacttgaagccaagagtttgagaccagcctggccaacatggtaaaaccccatctccaagaaaaataaaaattagccagggtggtggcgcacacgtgtggtcccagctactcaggaggctgaggcacaagaatcacttgaacctgggaggtggaggttgcagtgagccaagatcatgccactgcactgcagtgtgggtgac[131 bp omitted]ggctaacacggtgaaaccccgtctctaaaaatacaaaaaattagcccggcatggtggtgggcacctgtagtcccagctattcgggaggctgaggcaggagaatggcgtgaacccgggaggcggagcttgcagtgaactgagatcatgccactgcactccaccctggacaacagagcaagactccatctcaaaaaaaaaaaatgaaagctctggcatcgttaggtctgacttcctactggtgaccacagtcagtgtaagctggaaacggagctcctttctcctgggctacagtgctctggtttccccactctaccatctcacactggctcccttattagcctggtgctctctccagccccgtaggatgcacttgtaaccctgaatccaccccatgcacggagctggatggtttgggcacaactccctcttttggctttagttgaaacactcattccaggctcttggttttacaaatgagaaaatggggtttagcaaagagaaatgagttttcaaaccagaggccagtggttaggctgtgcagccacctctgctctcctcccctccctgtgtcagcagggatattccggagcctggtctgaaactgctgagctcgaagggcttggatccaacagtgctgatcatgaccacggaggtatggcctggtcactagggagagagctgagctcgaggggcttgtgtccaacagtgctgatgaccacagcggtgtgtcctggtcactgggagcggctgggctctaggggcttgtgtccaacagtgctgatgaccacagcggtgtgtcctggtcactgggagcggctgggctcgaggggcttgtgtccaacagtgctgatgaccacagcggtgtgtcctggtcactgggagcggctgggctcgaggggctggtgtccaacagtgctgatgaccacagcggtgtggcctggtcactgggagcggctgggctcgaggggctggtgtccaacagtgctgatgaccacagcggtgtgtcctggtcactgggagcggctgggctcgaggggcttgtgtccaacagtgctgatgaccacagcggtgtggcctggtcactgggagcggctgggctcgaggggcttgtgtccaacagtgctgatgaccacagcggtgtgtcctggtcactgggagcggctgggctcgaggggcttgtgtccaacagtgctgatgaccacagcggtgtgtcctggtcactgggagcggctgggctcgaggggcttgtgtccaacagtgctgatgaccacagcggtgtgtcctggtcactgggagcggctgggctcgaggggcttgtgtccaacagtgctgatgaccacagcggtgtggcctggtcactgggagcggctgggctcgaggggcttgtgtccaacagtgctgatgaccacagcggtgtggcctggtcactgggagcggctgggctcgaggggctggtgtcttaacagtgctgatcatgaccacagatgggacatggtcacaagggggcgccacatcccactttcctaccctaaccgcctcctcccccctcaactttcttccagctggggcgctttgcatttgtggctattggtgcgtgtgaacaagcgctccttgcgccccacagggcctctcccctgctgtggcgccgcctggaccacgcttcctgaactgcccttggaagttcccctctttcctcgcggctcagcttttccgtccacttactcgcccgtgtttatcgggcacgcacttcctgccagtggctctgctaagcaaggggacacggcggtgacctcgacaggcacaatctctgccctcacggggagtgggagtggttgcggggggggacacacacagatgatgactgaagagacaaaaagagacccctgggggtgagacatggaggaagtcctgggcatgggcaggtgtgacaggcagctgtgtgggaggcgggtcccaggggagtgagatccagacagacctgggcaagaggaaggggaccctccacccagctcacttcctgctctgaaggccgcagtctgtatccctgagggcagggactagcgtgtctgccccgctgcatccccagtgcctggagcggacgacgagtcgagggtgactccaccaggcggctacggtgtcaaagcagctccggcgtggggtccgactgtcctgagtttgaatcgggttctccatttactgagcgtgtgatctaaagtgagtggcttcacttctctgagctggctggcttctctgtgaccagcgacatccagccatgtctaaacagtgtgggcaaagccaggcagctgaaaccaactttgctgtgtcttgttttaagtcctggagaagtcccttccctctgagcctgctttcccgtctgtagagtggagggttaaaagaggttgttttgttttgttttgttctgttttgttttttgagatggagtctcactcttttgcccaggccggagcgcggtggcactatctcgaatcactgcaacctgtgcctcccggattcaagcaatttcctgcctcagcctcccgagtagctgggattacaggcgcccacccccacgcccagctaattttcatatttgtagtagagacggggtttcgtcat[138 bp omitted]acattgaaccgtcaccttgctccccagggtcccagctatcagccatatccaagccctcactgcggagagtagataggagacagtcacttcatacattcttggggacatgataagcgtctgacctctggggagggtgatacagctggatctgttgggatccaaacgcacattccccttcatcttacagttcctgtcaggacaagcagcacagggtatgggtcggatttggtccgattcttcctgctgcattggtacagtagcagaagactagaaacaggcagactgcacgtcagtcaggaattaaacactgtgtctgcacaaaggaacgctttgaaagtgttttttaaaataagaaatgtagatagggctctttggaacaatcataggtagatacataaataggtatagttgatagatacatagatagctaaagatagatgacagataacagatagggtacacaaatagattattgagagataatagatggtgaagataggaagatcacagatatgtactatggaggtagatgataaattgacacatatctatgtaagtagataacagatgatatacatgtatgatatagattatagatgatagacacatggatggtgtaatgataatagatgacagatgactgatacataaatgatagctacatatagatgacagatatagataattgatgcatagagggaataatagaagacaatggattggtatataaatgataatatatgtagatagatgatgtatagtggatatatacatgatacatgatgatgatagagatacatatgtaaggggcagaataatatgcaaggaatgctttcatttgataaatttattttatttatttattgagacagagtttcgctcttgttgcccaggctggagcacacttgtttgtgtttatttattttagtttttgagacagagtttcactcttgttgcccaggctggagcacatttgtttgtttgtgtttgtttatttattgagatagagttttgcttttgttgcccaggctggagtgcaatggtatgatctcagctcaccgcaacctctgcctcccaggttcaagcaattctcctgcctcagccccccgagtggatgggattatagccatgtaccaccatgtccagctaattttttgtatttttattagagacagggttt[133 bp omitted]gattcactgagtatttcaagggataatgcaggaagaagaatgaggaatttgggagttgagatttggtaagtaatctcttcctcaaagtatccattactttttttaaaaaaatcttatttgtgaccaaacatcaattgctgatccaaatccccctgccagagtccccaccagcctgaatgaggctgtccgtccacagtctacttgctgtcatggctagtggccaccccacttcacaagcatcccataaggtacagatagactgatctaagtgttggcattagattctgactattaagctctgctacttatcagctgtgagagcctggaggactatttaacctccccaaagcctctgttcccttatctgtaaaataggaacaataccctcttcgaactgatcgggaggcgttaaaagggaacgcgtatggattaaactgagctccatcatcccagactcagctgtgggggtgggggtggggggtggggtggggggggggggggaatctctgtccatggtgctgaaagaccggcgccagaaaatagggaatttctggatagacttgtccatcaaggcaggagaggaggcaaaatcaatggtgccagaggcaactccgtccccacccacagcctctttgagtggtagatatgaggggaaggagggtggatgtataccacagacacacacatacccacatgcgcacagacatacatatgcacaaagatacagatgcaccatccacacagacatgcattcatacatgcagagacacacacaattcacatgcatgcacttctctaaggatggcctggagtacaccagcccaagatgctctataaatggaaggttttctgacagaacaagttcagaaaatgctgcatgttttcacctacccctgccctggcccccagccccacccgggtatacagaatcatagtggaaagttctgagccgggtgggtgtggggggctagttttataattcatccagtcgactaaatcttggctcagcaccttccacctgccaagtactgttctgtgtatgagaaaatttcaatccggcagggtgcagtggctcacacctgtaatccctgcactttgggaggccaaggtgggtggactacttgaggtcaggagttcaagatgagcctgaccaatatggtgaaaccccatctctactaaaaatacaaaagtgagccgggtgtggtgctgggtgcctgtattcccagctacttgggaggctgagacagaattgcttgaacccaggaggcagaggttgcagtgagtccagattgcaccactgcactccagcctgggtgacacagcgaaactccgtctcaaaaaaaaaaaaaaagaaaacttgaatccagcattttcccaggttatttgaatacaagatcctgttttctccaaacatcttaacaatattccctggaacctacactctccaggctacccttagggaaacggggctgtatggaataaaatcatttccagatcaacactgccttcaggctggggagtaagctgggtggagggtccctttccactcacctgtctggccctcactccccctgggattgcctgtcacacctgccccctgcccaggactcctccacctcctgcctcctgagagcctctttttgtcccttcagcccttagctgtgtgtatcccctcccagcccccatgacagcagagatttgtgcctgttgaggtcactgctgtgcccccatgcttagcagagtccctcacaggaaagaagtgcccgataaacacctaagattaagtggattatcaactcagcagggggccgggggtggggggcatgggtgtcaggactttagatccagattaaggttctaccactttacaaaccagtagcctgggcaggctgcttcctctcctcgtaccagcttcagcagcagcagccgaggaatgatggcaaccacacagggcctttgtgaggactggactccgtaaggggcgtgaacgagtctgggcgtgccctccaccaaagtgagcatgagaggaatgggggccgaaggaacttctgcggtcactgccagggtgggtttgtgagcatggagcggccgcctagcctcaccttgccgtgggtgagcagctccaatgcaggtgaactacagggccgacggcaagtgccacaagaacccatgttcctttctttacctgggacccacgccgtgcctactgggcacggagctgctgcccaaaacacatttgtagaatgagtgagtgaggggtgggcaatgactacctgagtgcatgaatcagtaacggacagcgtgtgacaccaaagcacaggtcaggtgttgggtccggtgcaggctgatgtcaaggtggtcatgtgagctcgctcagttctgtattacaaagtgggatgagtagtgcagagctgggatttgagcctggctcctcgcccctgcatctttgctcatgcctgggagggcagctccagtgagttaacacatggcttggggattcccccctccacacacagtcatacaaggcaggcaggcaagctctcctttccacagggcaggaagccaagggtcagagaggttagtccacttgcccagggtcacacagccttaaggggcagggtggaaacttgccctgaatctttcttgctataggtgtcagctcctgccaccatatactggagcaggtagaagaggctgacccgagactcagtgtgcccgacttatggggcaccgagctgccaattctaccagacagggcacctcccatcctcccaggcctccagaagtgcccaaggccagagctccacagaaggaccctaggagaagtgagcaatgcttcctcagtctttgctaacccagcccactctgaactgccaaggttcaccccctcctttcgagtgacctgaaatttcaaaaactgacatgcaataccaattatctaagcaaggctctggccacttgagaacacgcttttttgatccacaatcactccctagtcctctaacaaatcctccaggatctgtagaccatcagtggccctggtttctaaaccccctgcctccagatgaggccccaggaccctcctcaagcacatcagggtgtgaaagggcagattaagggctctaactggaaatccgaatttctccttcaagtccccctctactatgaaacccccaagtcaaagacgcctgcagcttgccgcctccaatcgctcctgagtaatcgcagccttcagccaggttgaaaatacccctttgggaccctcactgcggcctcccaaggccccaggaacatgggtcctcaggacctgggctgtgggtccaggaaaccagtcgccatggtcgagcccccttctgatcatgaacaacagcgctcacctggcagggcggctgcagcggctctaccggaccaagcccctcgggcacgcgcactgcctgaaatgccctaagcgctcggctggactgtggcatacccgccctctcccccagcccctggctggctcgtctgcctggcccctgcagcagagacagctgagcgcaccatcctcctcccgtagggggcggggggtcctgtccccggagcggcagccgccgggacctcatctcccagcctccttcgcagggagccgcaaccacgggaccagccccgtgaacgacccaggtagggggacgtgcgccctttgcagtcagagtctcccccagaagctggaggcaggaggagggtgcttttggggttaggggcgggggccacacgataggagtggaggaagccagccgcccctgtgagagggtggtagaagccgtgggggctccttcccctgcagcgggcaggcctggccctgaccagtccgccctgccccatctacaagcagctcccaggccctgtgagtgcccgcaccatagtgaggatatccgcggacaggcccccctgcctagagccctccgcgggcgacccaacgggccactcccggggcgcggctgacgctctgctgatgccccggcgagagcctccgtttacccctcttgcccttctccctcccggactcaagaaccacgcagagggggacatttggatagtgccgtttattgttccagcaccccttcctccaccacgcccaggcctgggacaaacgggcacccgcctcctgcggcgctgcctctgctacccggaatccaggaggggaaggaacgactcgagctctaaggatgggacccggaaggcagaaaaaaataatggattggggcgggcggggagtcaaaaggtgggctgattaaaagaaaattctaaaagagaaaagggcccctggttctcttccctctctgggatcctctaaagggcctggtttctccattcctcgcagcaccccccacccccgccccggacaactgaggaagagcagggaaaatggccttccgcttggggcctggtcgccactcggcctctgcagttctctccattgtctctccggctcgcaggccgataacttaggaagggcgggccaggctgagggggcagagtctcgaggcggagaagtgaacgggccctaatacgccccagtgcccccccacggacggcgcagggacagaggagggcggggagccggggatgccgcggggtccatcgcaccccgtccgcttctccctgggtctcttggtcttgcacgtcgtcgctcccgccaagcccgaggggccctgcccgcccccccccccgggcccctcccctaccggccctccccaccgcggcactcggggcaccgcccgcccgcggcctcgtcgtcgtcgtcctcctcctccccgcccgcgcggtagtagctctgtccgcagctgctgcagaccgagggcgcgcccaccgcgtggatcttcttgtgtctccggagcgcggcgccctgcacgaagccctccccgcactccacgcagatgtgggccggctcctcgccccccgccgccccgagcccgtccccgtgctgggcccgctggtgcgccaggagcccggccccgtgcccgaagcccttcccgcactccagacacacgtacggcttgggggccggggcgcgccgcgaccggggccccgcggcctttgcccccgcgcccgccatggctgccgcggccgcggccccctcgcccggcgcgcccaccacgatgatgccctcgccatcgcccacggggatggcgatctcgccgtccgccgccaccgcctcttcgggccccttggcccgccggacgctagccgccagcaccttggccgccacgccaggccccgacagctccgggtgcagccgcaggtgacgcgcgaggctcttgggctggctgaagccgcggccgcagcgcgggcacacgaagggcttgaggccgctgtgcgagcgccggtgcttggccaggctcttgctctgagtgaagctgcggccgcagtcggggcaggtgtagggcttctcgcccgtgtggatgcgctggtgctgcatgaggttggagctccagctgaagcgcttgccgcactccaagcaggcgtagggcttctcgcccgtgtggatgcgccggtgctgcaccaggtgcgagctctgcgagaaggtcttgccgcagtcggcgcaggcgttgggccgctcgccggtgtgcgtgcgctggtgccgcgtcagcttggaccagtggctaaagctcttgccacactcgttgcagatgtagggggcgggcggccgcggccggggaggcgggccggctgggggcgcagactggggcggggacagcttggtgggaggccagctggggacgtcgtcatcatccatgatgaggatgtccactggaaagcaagagggtagggggaggtgagtcaagagaggcaagggctccacgcctgccttggctgctacgctggcctcgggtgcctcgctccccctggcgcaggacctgccctggtgtcctcagagtgtgcatcactccctgcattttactaagtatttattacccctctccccagctaagacctcagctctgtgtgagttaagaccctcagtttacccccaacctctagaacaatgccccagacacagaaggcctggtctgtaaacaaccaggcaacataagaggcatgggcgaggggcgggatccacggaaggctcccagaaaaggaccccgaaacccaaaacaccagcctggacgccgggggcagaggatgaggaaggctcacgggcaaaggttccactaggcagaggggccgcagggcttgaatgcagccctggacacctggtcctgagccagggagtgggtttggcaccctgaagacgtgcccgccagggagcgatggtgtcacattcgggctccaggaagacaatcctggctgcagacaggtaatgggattggagatgagcatgaaagccccacctccgaacctgggagtaaaacctggctcaacgccacctccattacagaggctatggtcagcccctggtgtgggggctcctgtctgctcagtgaggacaattcgggcacacagggctttgcctgcacatctttacactgaggacgcccttccagcagtcaacgaggcctttcacacttctgcaccaggcctgcccctgggggctctcccgggagggatgggcttgcctcctccccagctcattcactcctgagaagggtccgtgtgcagcttctacatttgctctcccttggggcctggtccagagcaacagaatcaggtgggagggcctcagcaagtgcatctctgacccccgtggacaccccaggtgcaccccacagggttttttcaaagccatgaatcacaattacaacgttctcactcctgaccttactagactgtaagctcctaagtctctatcccaacacctggcacggtggtgcccagcacacagagcccaaacaccctcccagatgccacgctggcaaacacgcaaggaagggccatgacgcccccctgcgctacacacttcagcgtcaggtcctcataagctgggagcacaaaactgagcctttacaagggagaaactgaggcactagggagtcgagtcacagcccacagctacacgactacaaagtggcaatgcccagaagcgcattagtagactgggtccaagaaacagccatctaccactaactgcggccgcccaccgctaaatcccccacccacaggcagcacaccctacacgctaagggagtgctccacaaagtgggatcctgcgaccagt[132 bp omitted]tggccaacatggcaaaaccccatctctactaaaaacacaaaaattagccgggcgtggtggcgcatgcctgtagtcccagctacttggaaggctgaggcaggagaatgacttgaacccgggaggcagaggttgcagtgagctgagatcacaccactgcattccagcctgggcgacagagcaagactccatctcaaaacaaaacaaaaacgcttatgctcaggcctccctccagacgcactgtatgagaaagtgccgggccgggcctgtgcttcagcaagccccccaggtgattctgatgccagctccagtgtgagaatcactattccaaggcagagagtattcgaatatggctcttgaacctgcggcagaagaaaacactccaggtgaagtcaggaaggggggagccttctggagagatggcatggagcccactgcgttgtcaacataaatcaaaaaatgttgtaagttataagcacattacttaaagatgtagagagaattaaaaacaaacatcagaagctatttgccccggggcagtgtgactgaaggggacagaaagggacgggcaggaaagagatttgttgtcaccgtaaaccgagccatactatctgaaccttacaagtgcttctacgcctttaattaaaataactgctttgttttcgaagctgtgaagaaagaaagtgtagcaatgctccctgtgactcagctatgaatagcatttattcatgacgacatgaattctgaacacaaaacttgtgacacagtggcagctaagacaggggcactggggcgggtgtgcagtacgtggagagcgcagtgagtggagagtggggagaggatgtgggagccatgtcctcacctcccattagatttgcaactatcaaagcaatttcatgagctctttacctagaaccagggagaaccccaaagagtgcatggaggggctccttcctctagaggcaaactgggagtggggaaggcaggaggtgggagctgttttctgctttaggccgtaggcgatctggcttctctacaggcatctctgcactactttttctaagtacgagttaagcactgttaaatggacagggtttaattacttaaaaggcagggctcttttacatcttgcagattcctgggctctgcgcaaaccttcccgtgctgcatctcagtaaggcccaggaaaccgcgcttcacaggcacagactggtttctgacaagaggctgcgtctgcaccgcgcatgggccaagatgagccgctccacttgccgcagccgcagccgcagccgcagccgaagccgaagccgaagccaaagccaaagccgaaaccgaaaccgaagccaaagccgaaggcgaaaccgaagccaaacggaagccaaagccgaaaccgaagccgaagccgaagccgaagccgaagcctcaccctcaccctcaccctcaccctcacaggagcaatgaggctaacagccttctccacctcacagcaccatctttaaagggattcaacgaattcccagcaagagaagagcacggtgaggagcacaagagttctcattcaattaaaaaaataagaaacaatgagggccggggccactctgatggtggcagcagttacccttgggggagggcagtgtccccagacgcctggccctgggctaaatgtgttccgtggattaccacatttaatccatggccaacactatcactgtcctctcactgaaggactcagctgaggtcccgaggggatgggctggggggcggtcctccactccagatcccctacgccccaggctctacctctacgcctcctgccccacctgcagcaccactactccaggaagcccaggtttcccctccacgggagataaatgtttctagagcaaaatctggaaatgcttttttttttttttttaagataaaattcctgagttcacactgatacttcccatagaaattcaggactaaagttttcattcatccttttctttgtgacatctgcacctcccttcagccccacggagaatcctggttctcaaggacataggggatgacagaactggaatatcccacagacgcaggggatggcgggagtgggataccccacagacacaggggatgacagagctggaatatcctacagacacatgagatggcggaactgggataccccatagacgcagggggtggcggaagtggaatatccatagacacaaggggtggcggaagtgggatccccatagacacaggggatggcgtaagtgggataccccatagacacagggggtggcggaagtgggatccccatagacacagggcatgacgcaactgggataccccatagacacgagatggcggaagtgggataccccatagacacaggaggtggcggaagtgggctaccccatagacacgggatggtggaagtgggctaccccatagacacggggtagcggaagtggaatattccatagacacaggggatggcggaagtgggatattccatagacacaggggatggcggaactgggatattccatagacacggggatggcggaagtgggatatcccagacacaggggttggcagaagtgggatattccatagacacaggggatgacagaattgagatattccatagatacaggggatggcgaaagtgggatattccatagacacaggggatggcggaagtggaatattccatagacgcaggagatggcggaactgggatgccctatattacaaccctcttgctgggtgcacacgcgatctcagggtaacaatgctactgctaccactgccaggcacaactcctggactgtgctgcacgcaccgtcctccttcccctcagtgttttctcggctgcatcccctccgtcaggtgcaggtcttggccgactgagacatgttcgggctcaggagactgacctgctcacaccctcctcccatccctttccctggtcagttgtctgaggctcattcgcttttaggttcctcaggaagggcacagaggaacggggttcacagggctgttgctgggtagcctgtctgtacccttcccatctgaaggtcccttttccgtgagtcataatgccattttctcctggcataaagtgctaagtccgagcatagtcatgttgactttccaagtcttccacgctttctgccacgaaggatcggtgacttcctttagcgtccagcaattctaacgcaaccatctgtgatttgctctttcaatgcgcagctttcatgtgttaaggggtgttccttgaatgagtttttactatccgctctattcttttgctttgggtctcttcttcagggactctgcctatccatatgttggattttcttttcctaacttgtttcctttaaaactgttttaatcttttttcattttatttatttattttgagacgcagtctcactttgtcacccaggctggagtgcagtgacatgatctcggctcactgcaaccttcgcctctcaggttcaagtgattctcatgcctcagcctcccgagtagcagggattacaggcatgagccatcatgcccggcttttttttttttttttttttcattttcagtagaggcaaggtttcatgttggccaggctggtcttgaacctctgccctcaagtgatccacccgccttggcctcccaaagtgctgggattacaggcatgagccaccatacctggctaattttgtgtgtgtgtgctcttagtagagacagggtttctccatgttggccaggctggtctcaaactcctggcctcaagtgatccaccagccttggcctcccaaagtgctgggattacaagcatgagccaccacgccccgccttttttttttttctcattttaaaatgatcctccttcttgccttcaatttttttaaagaacgatgtttttattcttgagttccttctacattagtcttcattctgaaaggtttttgttcttatttgcaaatctttgccgaggctgccccctcgtttctgagtttgtgattatgctgttctttcacacgctgcactgcctcagctcgttcacaatcagcggcccccaacctttttggcactagggactggttttgtggaagacaatttttccacggacagggtggggaggtagcaggggatggttcagggatgaaactgttccacttc[132 bp omitted]gaaaccccatcttaacttaaaaaaatacaaaaattagctgagtgtggtggtgtgtgcccgtaatcccaactactcgggaggttgaggcaggagaatcacttgaacccgagaggtggaggttgcagtgagccaatatcgcaccatcgcactccagcctcagtgatagagcgagactccatctcaaaaaataagattctcataaggaacacacaacctagacccctcatatgtgcagttcccgctcctgtgaaaatctcatgccgccgctgacctggcagaaggcggagctcaggtggtaatgctcgctcatgcgccactcacctccccaagtgtggcccagttcctaacaggccacggagcagcaccagtaccaaggactggggaccctgtactaaatgatcttgatcttgttgggatgcacttccggcctgcctatctgtagaaatgccatcctgtcccttatcttttttattataatcacttttgggaaggttgaactcagtatttttctgttgctcattttatgtataagtttccttgaatttctaggaggcggcttggttcagggtagctgttctaacttctcagaggttctcacacagcaggtaaaaacgctgcaaccagcctgcacagatgcacacactccagccgctgtccccactgtcatcaggaccttctcctgccttcctctgttgccaaggacaggggccctgctcgattctgattcctcacatgaggttctgccctgcacagcactttacctggttgcttagagagctgcagggcctgagctgccccagccccttttgggccttcccaccagcctctctccccactaccctggtttggacaaaacagctcctacttcagctgctggtcctaaagtgaccccgactcccctgcccagctttgcagtgaagacctgcaggctgtctgtggctctcctctgcttccctcctcccagtcagatgctaacaccacacaggcctcggtggtttatcctcatccagctgtattttgcaactcatggggataacttaggacctagtaactttgcaactgtgatccagggaacttgagttttgctacctggttgccgtgtttttatgcagggatacaggagattcaagggccacgctgtggctgctctgccatcacccaacactcagaactgtcatctggccgggcacggtggctcacactcgtagtcccaactacttaggaggccaaagcaggaggttaacttgagctcaggaaattgagaccagcctgggaaacatagtgagaccccgtctctaaaaaaataaaaaaaataaaaaaataaaaaaaataaaaaaactagctgggtgtggtggcgtgtgcctggagtcccagctactcaggaggctgaggtggaaggacagcttgagcccagggggtcaaggctgcagtgagcagagatggcaccactgcactccagcctgggcaacagagcaagaccctgtc[134 bp omitted]aaaactacaaaaattagccgggcatggtggcgggtgcctgtaatcccagctactcaggaggctgaggcaggagaatcgcttgaacccgggaggcagaggttgcagtgagccgagatcgtgccgttgcactccagcctgggcaacagagtgagactccgtctcagaaaataaataaataaataaaaataaaacaaaataaaataaagagagatgagggtgcactgaaacatggagcccgtgctcacccgagggcagccagaactccagctgtaagacaccggctgaagctttcctgttggcaccgctccctcctcagaagcggaatgtctttatttcgttatctgaacagctctgaggctgcctgagctgtcgctgcccggtcccacacccctcaccctctcaacatcgggaactccatctggggtcatcaggagaaaaggccccaggaggcaggttaggaagcgccagtcagcctagagccatgggtctcaccctcctgagatcttcaggagccccggcctcagcctgcaggaggctgcatgccacccaccagcccccagctccacggcccaggcaggtgtctcggcccttttttcccagcacccagacctcatggggttttgtgcaaatccaacaaggtaaccacctaagggggctgcactgactgcaggcacacaggacgtgattatgaagtgccggccattattcctaccagtattagctcagaggatctgaacacacctcccagaaatactcaaatacagaaaaaaatcacaaaatttctaaggtttcaaaaacgccccaggtcaatctatctaaccagaaagaacactggctttgtggcttttccaatctcacatgcagttcttcaccgtgctacacgtgggaaacgccgtgctgtgaacttcacgcccaccacaggccacgcctcgcgtctccactgcgggcctcagcccggcaggcagtaggatggactgcgtggacggcggccagcatgtaaatgaaacggaatggaggcaggaggaggaaacacccgcacgtgctgctagcacaggaagaactgttctgtggaacttttattttggtctcctataaaatccgtacgtttctttttatctggctgtgttcctgcgtgcaggcacggcgcgagggatcaactacccccggccctgacggcaaaggcgctgcagagccagtttactaaaatgaaggaagccgagaccccagggacaaagccacctggcccaggggacacacagcaccctgctgtgccacgtctctcaggggccttctggtcatcagcaggggcaaccctactggagtgacctccagtaagagatggggtggggaggttcaaacctttggaatttcgggaggcttgggggagaagaggcatggagacttttgttcagacaacctcatgctgaagcccggcctgctaagcccagcaagggcacccccggtcagcacccgaggccccacccccgacccaggtctccagggacactgaggcaaagccatgggcctgggtgaaggagcctggggcccatacagctccatggaaggaacatgtgccaggggttcctggcacgctgctctccccacaacagccacagaaagctttccaaccacccaagcctccctggggacacctctgaacaggggacatggccgggagctacccacagtccaactcctttcctcttcacaagaaggtcccaagtgtgggctgcctgggattcctctggatcgtggggacccacctgccctggccagtgaggcctgcctgggagcttcagaacccattctcctctcacactcctcagaaggagaggcccaaagacaggcaaccccatgctgcagggtgatgccacccaggtaatacggccgcagggtgatacggccgcagggtgattacggccgcaaggtgatgccgcccgggtgattacggccgcagggtgatacagccgcagggtgatgccaccagggtgatatggccgccgggtgatggagcctaggtgatacggccaccaggtgattacggccgcagggtgatgccgcccgggtgattacggccgcagggtgatacagccgcagggtgatgccaccagggtgatatggccgccgggtgatggagcctaggtgatacggccaccaggtgattacggccgcagggtgatgccgccagggtgatacggccgctgggtgatggagcctaggtgatatggccaccgggtgattacggccgcagggtgatgctgcccgggtgattacggccgcagggtgatacggccgcagggtgatatggccacccgggtgatacggccgcagggtgatggagcctaggtgataaggcggcaccagagagaagtggcacagcaggacactgccggagcttcctggggacccaccacctggggctgaggcactgcctcggtgtggccaggacgtcacagcaaggggcccagagacaagcggctctcaggagagaggccaccctggatctgtcccgcctgcaggccagctgcccgagaacatatcaagtccttctgggctaggccactgctgtccgggttccctgtaatcagcagctgagagcgtccccactgcccagtggcttcccagggccctcgagccacactgccacatcccctgcagggcagcccaaagccccttcctccgtgaacgaagccttgcctggcccccaagacgggaccctctggttgaacagtctgcaccctgagcgacctggtgccccagggagtgatctccaggaagctgaaggacaggcacgcaggggaggggacatggggacatttctgctgagacagcatttcatggagcagagagctggcggaaggggacagaaagggggagtcacaccaggtgcggtggctcatgcctgtaatcccaacactgggaggccgaggcgggcagatcacctgaggtcaggagttcaagaccatcctggccaacacggtgaaacccagtctctaccaaaaatacaaaaatcagccaggcatggtggcgggtgcctgtaatcccagctatttgggaggctgaggcaggagaatcgcttgaacctgggaggtggaagttgcagtgagccgagatcgtaccactgcactccagcctgggagacagagtgaggctccgtctcaaaaaaaaaaaaaaagaaaagagagagagagaaaggacgagtcacacaacaccctctggggaagaaaactgcagcagggccacgcaggctgggggccgtgtcaggggtccaagaccagctgggaggcagacggggagacagtgtgtagggctgggaggctggacaggcggcggattctcgctcccgtcaagccaggacaccttcacagggttctgagcacggcgccgggatctcgcctcctccccaagaggctcaggaggggacaaggatagggacagaggtcgcaggaaggccagtgcgccgtgactgtgtgtaaggccacagggctggggccgtggtgggaagaagcgaccatactcgggatgtattcccagagcaggtgccgggacacacggaagtcaggagctgaggaagggtccggggtgagggcccgctggtccacggcatctaccccaaggcctctctgtgctgagtgcctgcagcctggctcgggtggcaccctccctctttggcactccaaccagcatctcctgcctccaacacaggacatagacaccctgccccatgacccagcactgcagggctggggttggcaagtgctcaggctgacacctcctgctgctggttctctctgcctccttctcaaccttccctaggccactgctcacatgcaggatggtgaaagttgcctcctccctgtctgaggaccccacaaggtaggctgagggcctggacgctaattccgcagaagaggctggggccaggtgggctgcgagccctgctggttcccttttctctgcctggcgggcatgctcccctgcccctccagggtatgctcctctccagatgcctgccccatgggcccccatatccctcagcaataggctagaggaaaagggaccacacacgccatggccaggccaacacccgccaccccacccccacctacgatgtctgtcactgtcacataggagggacgcacataagcgggaccccacatgctatggccaggctaacccccgccactccacccccacctacgatgtctgtcactgtcacacaggaggaatgcacgtaagcgggaccccacatgctatggccaggccaacccccgccactccacccccacctacgatgtctgtcactgtcacataggagggacgcatgtaggcgggactccatacgccatggccaggccaacccccaccactccacccccacgaacgatgtctgtcactgtcacataggagggacgcacgtaggcgggactccacacgccatggccaggccaacccccgccactccacccccacctacgaagtctgtcactgtcacataggagggacgcacgtaagtgggaccccacatgctatggccaggccaacccccgcctacgatgtctgtcactgtcacataggagggacgcatgtaggcgggactccacacgccatggccaggccaacccccgccactccacccccacctacgatgtctgtcactgtcacataggggggacgcatgtaggcgggaccccacacgggagttacgcgaacgccggacaccagagcagcttgggagcgtgcgcagcccatctttgacagccgagcaagggcgtcacgcaggggtgatgctccagaggcggcgccaagcgcaggccctccccggagccagctgcctggtgggggacaggactcccacagacgcagggccagggctgggcagggcagcgggctggacaaggggacctgacacctaccttctacaaagagagtgagtgtatgagtgacttgtaaaattaaagatgaacttactcaaagacaagcattttggagacaacgaagtattttaaaaaggaccgggtgctagattagatgaagttcctgaaaaatgacattttgttagatgagatcagcttcctgtagggctttttctttttttcaaggagtccttacatgttggagaatttacagacaaaatgatgtgatggatattttctctaaaacgctgtggaaagagaaccacagtgggcagaaagggaccagcagtgccgcgaatcgctggcgcaggaagagggattcatcacactgcgtccacacacttgagatttccacagaattaattttcgaaaaggttcgaaggccaaggatgtatgcgagggagaaggcaggggcagccctcgagggctgtggcggtgcgggatggcaaccacccactgagacgcggggcagcctggggccggggtgtgggccccctgggcatgcggtcctggcaacgcactcaaaacccccatcatagtttctaccccgggaccaaggctgccacagccccgcccacagggagcttctgttcatgctccatccacagatctcagaaatcactcaaaaaggggctgaggtgctttacaaaatcgatcccaaacttcaccccggtctttgtatgggacgactcagctatgccagcctgagctggcaagctctgccggcctttctgcatcaagtgtgcccacgcatttccgtgtggactgtggctgcgtggtatctgtgaggcccgcagcctgcaagatgaacagtatttcctctctggctctctgcagaaaaggtctgctgagccccggccagcgtggggccagcgtgggcctgggacctggggcctgacatgcagacacagcaaggagagaagctgccgcaccttattcctcaggtctgaggcagggaggcggcctccgtggaggggagggaggccatgaggtgtcaggggccacagtgaggtcaccatggggccttcgcaagcaaacctgggccccacgtagcccacaaatgagttttgctcaaccccaataatgctttattaaacaaacaaaacacattgccaatgtccaaaaagtgaaggatttcacataaaaacccaaactgacaactttccctgaaaagtctgcgtcagcctgcgggttccctgcactcctgagctttccctgaaaagtcggcatcagcctgcgggttccctgcgctcctgggccacccctggtgtaaggagtttcctgccagggagggccacaggcccgcctggaatcatagcagagggtccaggatgtggaggcggggctgtggggagaggaagggggcaccctcaacagacgggggtgctgcccaggctggaggggcaaggacagaggaagtcaggcagagaaggtggcccccaggggtccccaagatcatccagcagaaaggaaacttggagccacaacactagccctccctctacagccaggagtgcaaggcccagggcgggaggggaggccagggtcgggtggtcccagggccccaagaggggaaaacagggaaggggggtttcctcccacccagaggcaaaggaagccagggtcaggtgggaggcagcggggtcggctgggaaggcctctggctgctcacctgggttctcgtgactggccatctgctggtcctcagaatccagcggccccggagaccaggcttcttcccgcagctccatgtctgggtccctgttagaaggggatgagacagaaggacagagtttatggggtgccaggctgcaccgagggccctgcagggaggcagcctgcagaccccggcgtgacaggcacagcgcccggcagacaaggcacacagcacctaccccaggacaccgagaactggcctggagctagcctggccgctccccactgcaggggccagccaaggcctcacacagccgcaggaaggactcaaggaccctcaagggctacaaccaccgccagttcccatcccagccccaccactccccagctggacctggggcaagcaaccccacctcgcgcctcctcgcgcctcagcttcctcactggcaagatggagaacatgttactgtcaagcgtacacaagacagtgtacatgtggtgctcatgccaaacagggactggagttcccacacccctggcagatacttacccatcacagcagaaacagggcaacaggcgcctaagggtctctgcacacgacactcccaacccgtgccacacaccgtgagggtctctgcgcacgacaccaccgacccgtgccacgcaccaggagggtctctacgcacgacaccaccgacccgtgccacgcaccgggagggtctctacgcacgacaccgccgacccgtgccacgcaccgggagggtccctacgcacgccgccgacccgtgccacgcaccgggagggtccctacgcacgccgccgacccgtgccacgcaccgggagggtccctacgcacgacaccgccgacccgtgccacgcaccgggagggtccctacgcacgacaccgccgacccgtgccacgcaccgggagggtccctacgcacgacaccgccgacccgtgccacgcaccgggagggtccctacgcacgacaccgccgacccgtgccacgcaccgggagggtccctacgcacgccgccgacccgtgccacgcaccgggagggtccctacgcacgacaccgccgacccgtgccacgcaccgggagggtccctacgcacgacaccgccgacccgtgccacgcaccgggagggtccctacgcacgccgccgacccgtgccacgcaccgggagggtccctacgcacgccgccgacccgtgccacgcaccgggagggtccctacgcacgccgccgacccgtgccacgcaccgggagggtccctacgcacgccgccgacccgtgccacgcaccgggagggtccctacgcacgccgccgacccgtgccacgcaccgggagggtccctacgcacgccgacccgtgccacgcacagtgagggtctctacacacgccactgatccgtgccacgcaccaggaaggtctctacgcacaccacccacccgtgccacgtaccatgagggtctctacacatgacaccaccaaaccgtgccatgcaccaagaggatctctacacacaccaccaacccgtgactgtgaaagtctctacgcacaccaacaccaacctgtgccatgcactgtgagggttctctacgcacaccaccaagcggtgccacgcacacacacagctaaagtggagagcagagcctttgccacgcgcccgagttgttgaagggttcatacccagatctctcttttaaaacaggctccctggctggatgcggtggctcccacctgtaatcccagcactttgagaggccaaagcaggtggatcagtggaggtctggagttcgagaccagcctggccagcatggcgaaaccccatctctaccaaaacacaaaaattagccaggcctggtggcaggggcctgtaatcccagctactcaggaggctaaggcaggagaattgctgaaacccaggaggcagaggttgcagtgaggagagatcacactccagcctgggcgacagagcaagactctgtctcaaaaattaaatttaaaataaaataaaataaataaataataaaaaaataaaatgaaacaggctctgaggcagccctcccagcccttctcccaccctcctgcaggcgcggctggaacctgaaccctcgcacagatcagggaagggcagggccgccaggtggagctgtggcaaacgtgccctcccagctttccacatgctggggtttcataaaccaggagcgcctcagcgaaactccacggggaggacacagggctgccaacttcgacagccgaataagggcaatttaaaaaaacgtcctgccggcctgagtgcagcggtgtttacaactaactgccagttacggatctctttgttccttctccatgccaactgcttcacttgactagccttagaacaaaaaaacctcctacctcccacggtagagatttggggcttggctccccgaatcccccggcacctgcaggaggcaggggctgtaaccacccagcttctcgggggaagcctccagcaggagccacgagaaacctgcccgaggaggcacagcctcccactgccgggccagggctccagggctcacaccccagggcccacacttctttattaaaacagcttcattaagatgtgatcccctcaccacaacattcccccatgtaaagtgtacgatgcaatgatatttagtgtattcagttttgcgaccctcaccacaatcaactttacaacaactccaaaaagcccgcgcgcccacggcagtcaccgcgcattcccccggccgcgcccacggcagtcaccgcgcattccgccctccgcgcccacggcagtcaccgcgcattcccccctccgcgcccacggcagtcaccgcgcattcccccctccgcgcccacggcagtcaccgcgcattccgcattcccccctccgcgcccacggcagtcaccgcgcattccgccctccgcgcccacggcagtcaccgcgcattcccccttccgcgcccacggcagtcaccgcgcattcccccgccgcgccctgcagcctctgaactcctttccgtccctctggacttgctgccgtgtgctctgcacaggagagggacagcatctgttcctgcgtgtctgactcttccacacagcatggtgctgcggcgtgccagcgtgtcgctcctctctcgggctgaaccccactccactgtacggcggccacagtggtccatgcacccacccatcgctggaggacaactgtgagctgcttccacagcgggcattgtgtatactccagcttcaacgccgcgtccatccatttatttctgtggacgttcgcgttcatctctctgggaaggagaagcctgcgcaggccccagcccgcccgcgagtcttcaattctgtgtcttatcagagttgcctactgaggtggaggcgggcacaaccctcgaccaaccattagcaaagcccatgctccggccgtctggccccagttcctggtgtgacctcacccccaggtgggtaggactcctggtgagacacagcggcgccaccccacctcgttccccaacaacctcaacaccggaagagaaaacccaggcgaggcccccttgggctgaatgcactcggctctgaggaaacctccggcatccagcacctcattccaggccggggtctgcagaccagcacgtgggaacggcggcatccagcacctcattccaggcggaagtctgcagaccagcacgcggaacagtggggcttccacctgagcaccacacacctccttggcacaacccctctgaaccgattttcccgagtccctccagtgacaagaagctcaccactatccaggtacagaacggagccagccccactgcagggtgctgtcaacctgccctcacgaagggcctgagagtctgaggagaactcgggacgtgcctgtttaaataaattcatgtgcacagatatgccatgtgggtcactgggcagcccctggccaccccaccccacggttccaggcactgctctaaacggctgacgaactgtgagtagattggggtccatgatagccctctgggtaggtctgactgctgtccccattatgcagatgaggaaacagaggcccaaggtctctccgtggggaaggggagaagggaaaggctggaggagtacagaaacagttcacacacagaccatcaggccccaagtctatgcccagtaccacccaccactacgctcgcctcagaaactgtgttcaaatcccacgtgggaacatgaaggccgcgctctccagggtcctcatttactgagcacctgcgaggaccagcagacatggggtcaccagaagacataagggtcactgggagaaacgagggtcaccgggagacacggggtcaccgggagacacggggtcactgtgagacaatggggtcactgggagaaacgagtcaccaggagacacggggtcacagggagggacaagggtcaccaggagaaagagggtcaccaggagggccgaggtcctgcccccaaggctcacagacagcaggaaggaagcacacggggaggggggcctaggggcagaaaagggaggggggtctagggggagaaagtgacgggcagctctgttggggaggctggggtgggccctcagaaagaaggcaccacaggagcattccctggatgggcagcgtggaggggaggggacaggcagcagcttgaaggccgggcatgctgggggctgcgggagaggccgctcgaaggccgggcatgctgggggctgcggaagagagagcttgaaggccgggcatgctgggggctgcgggaggggctgcaggtgtgtggggcagtacctgccgggaggactgcgagtcacctgaagcgcaggggacccttagaggtgggcactgttctgacgcttgtcttatggatgtggaacatgaggccggcagggcgagaccctcgggtcccctgcaacacgtgaagggcagcactggcggcagcagccaggagcagtgtctgtgccaggcacagagccacagagactcccaggagactctctcagctccagaagcgggaggcactgaaggcagccctgccaggaggcgccgctccccgctctctccacccagcccctgcccagtgctccctccacctcgcccctgcccagcactccctggctccctccaccccgcccctgcccagaactcccagctcccaccacccagcccctgcccagagctccccggctccctccaccccgcccctgcccagcactccctggctccctccacccaacccctgcccagagctccccagctccctccaccctgcccctgcccagagctctcctccagtcctcccagctgcctcctctggactccaggtgagggccacctcctcagggtccccacttgctccacctgcctgcctttctcttcctaacgcctgctactctgccactctccgtgtctctgcttagctggcctgtcctcccggcaccctgtcatgtcagggcccgctctgacacccatgtggtccctagcacccagggcagcgccaggcacagctgggtgagcacacaaacaggtaggtctggacaaagcacaggcttaagaccagacacagcaaatcccaacactcagcccctcgccggacctgtctcaggaagaggtgagacccacgcggaaggacaggcagacctcccctcggacagacccccgtgggctctgggtgcctcggatggaagagttcaggctaaactgccatgaacatgcttgcagcccgaccaggctagctctacctctccagaggctaccgacaggaaagcccaaatctcaggaaatgcttcttgcagagacagcctccatcacagtgaggttccgaatggggaaaccgggaggaactcaagagacccacgccggggaggtgggtggagtcacccctcctccacgggagcaagggagccggccaaggaatgacggctggcacccctcccacgcccaacatcaagagtgagagtgatctcaacgtttttcttatgttcattttcctaatattttaataacaggtaattacgtctgtattaagggaaaaagcctaaaggggtgtcttggacagcggctggggctacgtatcggaactggtagatggctgggtgctgggggccagcagtgaaggcgacggcacagaacaggccaccccagtgcagccccaaaggcacgggggcagcagcagatgcgagaagggtgctctagcctcccctttcttcctgcaagcagatgaaaccccacgtgaaacacgccctcctcgtagaggaagaggacgtgctcatcaccagcaccgggagctgaggctgagagacagctgcacacaccaacccttatctccctcagcctccccaaggattttagttactttttcacagttgctattcttgggcatagaagccctcaggtctaactgcttcaggaggccttcactttctgaagtctcccatgtacctgtaaaaataacatttgtggccgtgcgcagcggctcacacctgtaatcccagcacactgggaggccgaggcgggtggatcacgagatcgagaccatcctggctaacacagtgaaaccccatctctactaaaaatacaaaaattagccgggagtggtggcgggcgcctgtagtcccagctactcgggaggctgaggcaggagaatggcgtgaacccgggaggcggagcttgcagtgagccgagatcacgccactgcactccagcctgggcgacaaagtgagactccgtctcaaaaaaataaaataacattcgtaagcttttctcctgttattctatgtcaacctaattctcagactctgccagagacccaaggagggaagccactgcacgcagcctaatgttcaggaattacatagtggtgatgattacacaactttgtgaatatattaaaaaccagtgaattgtacattttaaaaaagcaaatgttggccgggcacggtggctcacgcctgtaatcccaacactttgggaggccaaggcaggcggatcacgaggtcagaaattcaagaccagcccggccaatatggtgaaatcttgtctctactaataatacaaaacttagccaggcatggtggctcgtgcctgtagtcccagctactggggacgctgaggcaggagaatcgcttgaaccccggaggcagaggttgcagtgagctgagatcacacgccactgcactccagcctgggcaacagagcgagactccgtctcaaaaaaaaaaaaagaaagaaaaagaaaaacgaaatgttgtaatacattaattgcacctctattagaaagtaaacaaacttttaaaaattgtacaggctttctaattacaacaccctagacattaaaaatgcgtaagactcagcactgtaggaaaggttaaaaaaaaaaaaagcacaggaaaaaaagggaagagagcagtttgcaacttggggctgaggaggtggtgggggctgctcctcacctcctcttcttggctgaaacctgtttgccaagtggtgataatgtacttccagtgaaactctatcacataactcaataaaagcagggacttcccagctcagagccttcccctggcctccacctccggccagcttcctgcagggtgaaggccttgaccaggctatggatgggggaggcgggagagtccaccctccacacccctcctctccaccgcacagcagcctgcccagaggccagcagagatcacctctcactcagcagggatctgccgcgagccaggaggcctgcactgcccagctaggcacaaggcatgattcctgctgtggttatagctgggtaggggggtagtgaggcagcctatagaggtggaggggctgaccccgggcggggagcgctgggcctcaaactgccccccagatactaataccttttacatgttttcaatagacagccatatacctacatgaaaagtagccttgatttcccctcttgttcctaaagcctaaaatgtttactatgtggcccactgcagagagtctgctgaccctgatgtaaataaaggaatgagggtgccggcgtttggggtgcacactttccaggccacagccaggccaaggaggcacagcagaggggctgagcacctggaatggcgccaggagggaggggcaggcagggacctggggcaaggcctgggcagctgggagggaggcccagcctggggctccgtgctcagcagctgctgccctggaattcctggtcacttcacctttgacccatattttgtaagtggggtccaagggcacaagggcttggtgctgggggctcctagcctgggcttgggggtctctgcacccacccgtgggtgaaatgccaaacacaaaacaccctggccgacccagagacctccaggaaaggaagatgcttttttcctgccttttagcataagggtccacaaattccatagccagaggggccgggggcagcagaggaggggtaaggggtgaggggccagagctcagggtctggtcgctcttctaagagggaggcgggaaggaactccgcaccgtggcgacctgggacagggcccacactgctctgcatcccaacttcctctccgagaagagggaggggccgacacctaccagggagatgtgaaacaaccagcctgggtgacagcactgtgcccctgtgagcaacgggcagccgcggtaccagtccttggcgtcatcaccggctctgccacccgcggaaatggctgagcctcagctgcctcctctgcaaagcagggacgggaagggcaggtgccttgctgagctgtgtggggactgagtggaggcttctgaggactcaccagggttaagacgggtgttcattcaatgctccccagttctcttcttctcccgtccctccaggcatgctctcagcccctgctgaagcctgtgtcctaatccatcaggccctacccccaggacctcatggcgggggcatgggaccctcacccgcagaggtgaacgatgggagaggcgggggcaccaggagctgcgggggcctgaggcagctcctgacccagctctcagggtccaggccagctccctaggagaaggccccccacttgctctcaagaaaaccctgggctattcaaggaatctaccagaaagctgggaattgcacatcttctgaaacgagggtcccggcctcccttaccagcctccgtttctcagtcggggtctcaggctctcccagcctctgcaggtgcttactcacctggctctgacctccgctgcagagaggaagcacctggagcacgggcaggggtgcgttcccctcgccccagcccttgagagatccaattagcacaaatgattgttattattgttgttattaagtcccgcccacccctctggaggcctgcctgccaattatcccctttcttctgctgccaatctcacctcctcctccccccgcactctcggaagcaactcctcctggccctccgtggccctccctgcccagaaacttctctggcacccacctgctttcttcctccccccagtctcttattccttcccctctacttgcagcctggagcagccacctcccttccttccccccaagtcatcctccaaccactgggctaacaccctctctgacttttcaccaaatcctgtggctccttctcagcctgactccacaacctctttggagccaccatgcaccccatgtggccctgcctttgtggggcgggggaggagctctggggtgcccagaccagccgttccccccaccccaccccctccagcacggagggctctggccctttcctccctcccaccctcactctcttctccccattccccttcccttggggctttcgctccctcccaccacgatcctggctcccaccctgcctcttggaagtgccctcctcacaccacacaccaactcatcttcctgaagtcactcagttcaaacaacccaattagaacccgggcaaaggatccgagaaagcattcctccaaagaaagacaaatatctgataggcacatgcaaggatgtcctcatgagccgtctgggagaggcagaccaaacccacagggaggcagcacctcacacccactgccagcctcagaaaacaagtgctggtgaggaccaggagaagtggggagacccccattgctggtgcgggcgccataggaaacacctggcagttagttcctcaaaaggttaagcccagaactcccataagaacccgcaattccactccttagtatagacccgagagaaaacatgcgtccgtccacgcaaaaatctgcacacgaatgttcacagaagcatcaggcataacagccgaaatgtagagacaacccaaatgtccatatggatgaactaactgtggtccatccatgaccgtaatggaacacgaccataaccaggtgtgaagttcagctgtgacagggatgaccctcgaacacggcacgcttggtaaaacaagcccgatgcagaacagcacgattctatttatgcgcctgcccacaagaggcacaccccgggaaagaaagcagatcagcacttcccaggaaccgggacgcagggaggcagggaggcagggagggagggactgctgaagatgcacggcgtttcttttgggatgaagaacaggttctaaaatcgactgtggtgatggctgcgtaaatcagtgaatacactaaaaaccttactgaactgtatattatttatttatttattgaaacagagtctcgctttctcgcccaggctggagggcaatcgcaccatctcggctcactgcaaccttcgcctcccgggttcaagggattctcctgcctctgcctcccgagtagctgggactacaagcgctgaactgtgtactttaaaagggcaaattgtacactatgggaatcatatcataataaaactgttctcaacaaaaagcaactcagttcatcacctccttgcccaaactgctgccactgcacgtgccggctgcccctcaatccaaaatccaagttcctccccaggcaccacagggttccatctggctccggcacctctgcaaaccccctcccttccagctggcccggatctcgctgtgcagtgcactgctcctgatgcaccgacaggctcagtcctggccaggcccggtctttcacccttaaggaccggccccactcctccacttgccccggccaggcctggtctttctctctgaggggccgggctcagtcctccacttgccccggccaggcctggtctctctctctgaggggccgggctcagtcctccacctgccctggccaggcctggtctctctgaggggccgggctcagtcctccacttgccccggccaggcctggtctttctctctgaggggccgggctcattcctccacctgccccggccaggcctggtctctctctctgaggggccgggctcagtcctccacctgcctggctcagtctcacctttcaagggtctactcaaatgtcagcttctccctgaggcccacaccccacctttcccatggcagggctgacttcctggctggtcagcaccttctgtcaccatgtcacgagcgtggtgatatcacttctattggtatttccttcctgggactctgcatctgctcctgggcacaatgctccctgagggcaggtgccaggggtgtccagcacctgctgccctggtacccatggctgcttccggaaccaacactgctgcccggccccgccgcagagccctctcctgctcaccttcccgctctgctcccagctcaagaagcccacagcgccacccctccactcccccaccagctctttcactgcccttttctgtggccacttcgctccctcactcctggcctgaaaacctcattcttgttccctcctgcacctccgcctggatctgcaggctaggtggggtgacatctacctggcatcttgcatggggccctcatttcctcagccccgggacatctctgtgacaccacggagatcccaggcctgccctccctgagggtggtggggaaagctctacacaccctttcctgttcattctacagtgactggtctgcgtagaccttccctctcgtctgagccggttttggcagatcacattctcctagagcacagcctgcacgtccctctggcggggttcaggacgcagagggaagccgttgtcccgtgctctggcccctctccctctctagaggccggccgcggca[137 bp omitted]gcctcccgagtagctgggactacaggcgcccaccaccacgcccggctaactttttgtattttcagtagagacggggattcaccatgttagccaggatggtcgctgctctattcttttccagccacttcacacctggactcgcgcagcagcctcccaaaggtttcccgcatgcctcccacccgcaccacccacaccctccccgtcagagccgtcttcctcgggggcatcagcacagcgacggcagagacagctcacggccccagccaccacactcaactactttccgagagggcgagagagagggacttcatctactgtcagggtgcagtgtgttgtggagacagcggggcacagcccgcaggacttggtgcctgcagatcttcagatccttatgcgaaggcttccgggtcttagggcagccgagtaactgagaattgtttaaaagacaaaacagtcttgaggccaaaagccccacacacctacaaagtacactatggactctgggtgatcatcaggtgtccgtgtaggttcatacattgtcacaaaacgcgctgccctggagtgggagttgacagtgcgggggctgtgtcgggggagggtgcaggcggatatgggaaatctgtgcatcttcctctcaattttgttgcgaacctaaaactgctctaaaaaaaaataaagcccctggctgggcgcggtggctcacacctgtaatcccagcactctgggaggccgaggtgggcggatcacagggtcaggagatcgagaccatcctggctaacacggtgaaaccccatctctactaaaaaatacaaaaaattagccaggcatggtggcgggcgcctgtagtcccagctaccggggaggctgaggcaggagaatggcataaacccaggaggcggagcttgcagtgagccaagatcacgccactgcactccagcctgggcgacggagtgagattctgtctcaaaataaataaataaataaataaagcccctggtcaccactcaggtggctgaggaggcaggatcaattaagcccaggagtttgagaccagcctgggcaacacagcaaaatcctatctcttaaaatatatacatatatgaaataaaacactaaaaataaagcctttatattaaaaaaaaagacacacacacacacaaaaccacacctgcggaccaccttacattctgtgacccctctgctgggccaacagggcaggctggccattttccagatggtgtggattctcccccggggcctttgcacagtcccttcctcccacctcacctgccctctcagtatacatctgcttagcccatctgccacggctcagcatcaacagcacctcccccaggaagctttcccagactgctcccttccctcagctctatcctctcttatccagcgacaaaagatcacactcatcaagcacggattaaatcccaggtcctgggtgcagggtgccctaagcacataagctctgatcctgggccccacaatcagtgggagacagtgcgaggccatgaggccagcacagggacaagaggacagccgttctgggcagggcagggtgggatctggccccccaggaaccagccacatgacctgggcaaggtgcttgggctacccgtccctcctgattaaatgagatgtgtgtcaagtgctcacccaaaagccgtggagatgcccagtaaacacagcctatcactgtggtccttgttgtatagacaaggaaactgaggcttccacaagcagagtggctagtacagtatcacagagccacagcgaggctttcaaaagcggagtggctagtacaatctcacagagccacagcgaggcttccacaagcagagtggctagtacaacctcacagagccacagcgaggcttccacaagcggagtggctagtacaacctcacagagccacagcgaggcttccacaagcggagtggctagtacaatctcacacagccacagcgaggcttccacaagcggagtggctagtacaatctcacacagccacagcgaggcttccactagcggagtggctggagcaatgtcacagagccacaacgtaggaggctggagccacacctgagtcggccagctgccaaagacagcttgcttccttctaactcttggacaacggcatttgtcccctttaacgtccaccattgaggatggtcctgtgtcccgcagggggatctgtgtcttactccgtgtcttattcacctctgcgacacctactataggtccccatcagtcccacagtgcatccagcagactgtgcacttgagggcggggctatttccagcaaagaccctgcacacagcagcctcaggaatccatggctctgactggctggaccctgggctgaggcaaggaccacttctgatgcatctctgggtcccaacactatccactgcaaggcctcgaaacaggggggccagatgggacccccatttagcacaagagagacgtccacactctgtgagcccaaagggagaaggctcaggccacggcagagacggaaccaggaaaacgtcacgaaaaacagcctcaagttgccaggtcccttgcaggaacagacaggcctggggccgccccacctgggctcagagcttgggctggtttctctgcagctgtaaggtgacagctctgggctcctgggacagggccactgacactggaggtgtgactgctcgaactccacacctgccttgctctccctgatgctgggtgagtgaggcctccttgggggttgcatggatctcagcactcaacttccgagccacttgtgcttctcccactatgctggggttcccctgaaccagccagcagccctgcgtgtaggagtcctcgtggacagtacaccccactaggcagggagtccagcgtctccaagccaatgactaacacctagaggacttcggaacagcctttgtccccctagaccccaacctgggggcggaagggggcggttgtgatggtcaagggtctgggctctggaatcgcagtagacacaggttctgaagctgctgggggccttgggctaacaagtgccatccagagcctccatcccatacccctaaaatggaggtgaccacctccatcccagagccttgagaatttaggacagtgaggaccaggcactgggccaggttcctgcaaagtgtgcaccagcaagtgttgtcgaatctgcagtttctcacaccacagaggccccagcacctggcacagtcctcactaggctggaggcctcaggatgcaccagaggacacacgaacgaggtttggaaaggcctgtgaaacatgtctgaggatgggtgtcctgagagctgtgtatgcctagtaacaaaagacctcccagggcagccaggcagttgctggtggccttgagctgtgacccctgccattccctgcccagagcccactgtcatcctcccttaagtaccaggttcctggtagccaatccttcctctctatctttcaagacacaatacctcccctgcaccacacacccctccctcaaggtcagagctcccgggagcactctggcaaatctccccacccctctgcccagtgtgaatgggtctcagctgctctgggacagggactgtatgattcctgccaggctgcccagcacggagcaccactctaccttgtgcttgcacagaagggccttgagatccctctcttcacccaggctgggccaggcacctcatctgggccctcacaggacagtgctgtgccaagaccatgtgtgacctcatgcccagcacagggcctggcctgtgcagccgcctggatggattacatttactcagggaattgtgaacttgctctcgtttttagacaactgaagggaaattgaacctgggaaaagggaagtgacatgtccaaggtcacagaagtggaagagacagtgccaaggccaaggcccaggaaagggcctggctccagagccctttccatttactttacacccatctgttgaggtctgctctggctctaaaatgaaagcattaagagccttcccgctgaggtcaatactattattaccactcccactctgtcctggtggaaagtaaggcactgaagttactcgtctaaggccacgaaggtgagtggtggggctgggacttgaacccaggcctgcccagtcccagagctcttggggaatacaacccagtgcctgcacacactctggcagtgcaccagggaggggccaggccgggtgcccggatggatggataagacatgagataagcaagcaggaatctgatctggatgttctctgaggccgtgcgtggccggaggaccacagggactgcgcagaggcaggcaggtgaatgtcagcagcgtttagccaaagaggcttacggtcttcagaggagctaagccaggatcaacgcaactgtgcttcccggcgctggggtcaatcggatccccagatgggttctaagcactgcgcaacatgggacctgggagcaggacaccgcaaagagcagaccaagccattccttccctaaagccctgaccatcccccggactgggctgggtcaaaatgccttccctggctcccacagcccccagacctctccatcaggggtctggtcaccttggatggcgactctgtcgcccgggtctcagtctctgccttccacccagactccaagcccttgttcatctccctgctccctgtctctagtgcccggcacagggcctggcactggaaaaacttctgcctccactcactcctgccttctgtgtctgtgggtcacttttctgtgcgactctgcaggtcccagagcactcatccacatgaattggggtcagctccctggactgggggtcggggtggggtgtcaggagggcggggctccactctgatccactcggcacaggggagggaggcctcaggagtcgccacccgatccagtccccgccttcgccctgccccgtgggccacgcggtggctgaccttggcccagtcacttcccccgctggggacgcgcttcctccccgcctgccgagcaaggacgaatgaatgggcctcctgccggccagaatccccgtaattacccgcctgatcaaaggccacgcgcagcccgcccggggcagcaacgggacccgggctgactcgaaaaggggaaggaagggctgggggggccgagggctgagaccgtgccctcggggccgcggtatccggccaggccagcccaaccgcgcggccccttcccccacctgggcctcaacttccccccgaagtcgccaccacttccggccacgaccggcggagttggaacttcggggggacggacagcggccccacccccgacggcccgcagcagagggacccccaccgaggcccccgctcctgcccccgccacgcgcacgcgcgcgccctggacccggacccgcgcacgcgcaccccccctccagccccgctcgccgcccgcgggccgcccgggcgcgcgtcccctcccacagctcttcggcgcgcacgcgcactccccccgcccgcgtcaccccggccgcgcgcccactcacgcccccccagcagcgcgcacgcgcgcccgccgcccagtcgcgctcgccctccagtctccccacccacccccagcccaagcccagcttcccgaagcgcgcgcccacctggcccccagcgcacggcccccgcccccacccctcacctccttggtcccggggccgccgcgccgcactcctcctcctctctcctgcctcgcggatggtggcagcggcggcagcggcgactcagaccctggggtcagggggacgggcgcccaggccggaagtgaccttcccggccgcttccgcccgcgccgctcccccccttctccctactccctgccccccgggccgccaccctgtcctcgccgctctaggaaggcgagcccgctatcccggccaccgcccccagctctgtggtgcccggcgggcgcctgagggagccacttccggaagtgtctaggacgcaggtcctccgtccatgctctatggcgccccgcgccgaggggcttcggccccgcccccttcccggacaggaggtgcgggctgggcccgttaggcggagacttccgggtgtctagggcggtgcccccccgacaacccgggctcctcgcgcctgcgcggccgggtccccgggcccgccgtgaggagagtgaagtggtggagagggacgctcgtgccaccccgggtcctcctaccgtctctatcatggtaaccccttctctgccgctgcacctcccagtggcccgagtccaggtgccttagttactggacagagaccccgggttccttagttactggacagagagtgctgcgcttcaggtgccatggcctcagtttcctcctttctgaagtgatgaaaatacattgtgcgcctccaagtgcttcacacgcactaggtcctagtcctaactagggcctcatggtaggtcctatccctatgttgcaggtgaggagtcaaatcacctaccaaaagtcacacacccggaatgccagagcctcggcccgaacccatggagtttggctctaaattcgtgtatttaacccttgactgtacacactgcctcgtgtcatagccctgagaatccactacttcccccgcgttaggtaggcacctagtaaggacgcactgggtgttagctgttactgttggtattcttgcaaaaaacacatattttaaaataattgtccaaaccatagtgtccttgtaggctggtccttctggtccttcctctgttctgtacttggctgactctcacctaagtggcagatgacttatcgcttataattgttatcatcctcactggtagtcagaaaagataagaagctataattcactggtggaataacacctttctcagcctcaatttctcatctgtggaatgggaaaaaataagataacctgcaaggtaatatgtgtaagagctgcttagttcaatacctggcccatagtaagttcacaaaaatgatggtggttattattacctattagcagtgttacatataagtctattgttgtggccactgtataccctcaaagctcagtgagcatcaatcataagatgtatattattgatttaataacatctttccatggggtggggtgaacagtgctgtgttaactgtgtgtgtcaataggaggatatctgtgtccctccttcagaaatatcacaaaggtaaatttttaaatatatcttagaacagaaggaagtgtggccgggtgcagtggctgacacctgtaaatctcaacactttgggaggcagaggcagacgtcaggaggtcaggaattcgagactaccctggccaacatagtgaaaccccatatctattaaaaatacaaaaattagctgggcgtggtggcggacacctgtaatcccagctactcgggaggctgaggcaggagaatggcttgaacctgggaggcagaggttgcagtgagctgagatcgcaccactgcactcttgcctgggcgatggaatgggactccgtctcaaaaaaaaaaaaaaaaaaaagagagtgaagtgctatcataacagcaatagaaacaaattattagggtacaaactctacacgaggaaacctgtttataagaaaagtcatgtgcttgtgctcctctgaatcagatcattcagtgggtgtcctgcagtgacctggttgttgggagggacagcctcctccctctccagcccattccccttcttcgctggtcaaattgacaacggcaagatcgagaacagctcattggcacaccagatggaagccaacactgaggatggaggagaaacaagacacagggagccagctagacactggatggcttcgtgaaagaggctccgtgccagctgagattttatgtgagagaaatcactttctaactcactgaaaccattggtaattctgagtctctcccttaaggcaacccaaccaataccaggatgtttcccaaacatgggatgggttgcagccgacatggcttaattgacaattaacatctgttcttcccttccgcagtacaaaatcactcttgggatgctgcttcccatcgatggattctgttttccactcctcttggcatctaagtgtggccttgtgattggttctcaccaatgggatgggatggaagcgatacaggcctcttccgagccaatgctcttaagaaacatgtatgttggccaggcacggtggctcacgcctataatcacagcactttgggaggccgagacgggaggatcagctgagtccaggagttcgagaccagcctggccaacatggcgaaactccatctctactaaaagtacaaaaattagccaggcgtggtgggcgcttataatcccagctactccggaggctgaggcaggagaattgcttgaacctaggaggcaaaggttgcagtgagccgagatcccaccactgcacttcagtatgggcaaaagagtgagactccatctcaaaaaaaaaaaagaaacatctgcctgcttcctgctctttcaaggccctaaagaaagaggggagccccaagaaacctgggtccctgaatgaccaccttgtggaaatacatcctgtcacctaacatctatcctagattgctacatgatcaagaaatacacatctaacttgtacacccaatgctcatagcagcattattcacaatagccaagaggtggaagcaacccagtgtccattgacagatgagcgaataaacaaaatgtggcacataaatgcaatggaatagaccagacgcggtggctcacatctgtaatcccagcactttgggaggccaaggcgggcgaatcacctgaggtcaagagtttgaaaccagcctggccaacatagtgaaaccctgtctctactaaaaatacaaaaaattagccaggcgtggtggcgggcgcctgtagtcccagctacttgggaggctgaggcaggagaatcacttgaacccagaggcgcaggctgcattgagccaagatcatgccactgcactgcagcctggtaaacagagccagactccgtctcaaaaaataaaaataaataaataaatacaatggaatattttttagccttaaaaagagagaaaattctgacacaggctacaacatggatgaaccttgaggacattatgctaagagaagcaagccagtcacacaagaacacatactttatgattccacttatatgagggacctagagaagtcaaattcatagagacaggaagtagaatggggggtgccaggggctggggggaggggaatggggtgttagtgtttattggagacagagtttcggttttgcaagatgaaaagagttctggaaatggatgggggtgatgggtgcacaagacgtcaataggtttaacactactgaactgcacagttacaaatagttaagacgtagccaggcgaggtagctcatgcctgtaatccctgcactttgggaggccaaggcctcctggctgaggtcagtaggtcaagaccagtctggccaacatggtgaaaccctgtttctactaaaaatacaaaaattagccgggcgtggtggtgcatgcctgtaatcccagctactcgggaggctgaggcaggagaatcgcttgaactcggaacgcagagtttgcagtgagccgagatcaggccactgcactccagcctgggcaacaagagtgaaactccgtccctcccagacacacacaaaaatagttaagacgttaaattttatgttatatatagctacaatttgaaatgtgtttagaggaaaaagtacccttctaacgtgatgtgccattacaatgtgtgcgtttctttattacagcagcttcacccttccctaatacagagttttcagatgccaggcagtaaaaatggtaaagctccctttcaggggtgcatcagcatctagatggaatttacagcctcgagtctgaataaaattggggttagggggcaatggtgagtacggagagaattgcaaatggctataacagcatcatttcacccaagttggcccatcagtggctttctctggatccttctctttggagagtccctctctggcatagatgccgggatgtgagaggctggaaagctcaaggcagtcttgcttcccaccgtgtggaggaagccagtctgcaggaggagaaaatgaagcctcacagagaggtgagagttggagggagacaatgtcccagctgagttgagtgcctaggccataggttcaggtgcttctactctgcctaaccttcctgagggctggacgttccactcttccttcccttgagtgaatgagtctagacttcttccaggaaagccctgttttgggttcctgccacttgtaaccaaaagagccccaagtctccccccagcactctgggcatcgcaagcctccatctacgtggaatgagtggtggacgaccggaatagccacacatctctgtagtgatatggaaggtcagaggtccccagtgcagaggcacgggcggcagctcctgctggggagccctttataacctcctcacggttttctcctgagggtgtggccctaggccgagtgacaggaacagctgcagctggcagattggagagggagagtttgcagctgttgaagtacaattgcttcgaagtccttgatacacagagaaacgcacacaatcacacttttcaaatgatcctccttacagtgataattaacaaacacttcttgagttttcatcatgtaccggacacactcctgggtgctttgcttaggtgaacatgctcaatcttcatctctactcccagacacagttaggccccggcaggcagcattgacagcacccacagacccatgagaaatgtagaatcccaggccctactccaaacctacagagtcagaatctgcattttaacccaatcctcaagggattcttagccatgggaaagtctgagaagtattgatgccaggcagactccaggatgcccagttaaatgtgaactccaaatcaaagatgagtaattttttagtgtaaaaatttcccaataccgtctgggcacggtggcttattcccgtaatcccagcactttgggagtccgaggtgggcagatcacctgaggtcaggagttcgagactagcctggccaacacagtgaaaccctgtctctcctaaaaatacaaaaattagctacgtgtgatggcccaggcctgtaatcccagctactcgggaggctgaggcaggagaattgcttgaacccaggaggaggaggttgcaatgagccgagatctgcactccagcctgggatacagagcaagtctctgtctcaaaaaaataattaaaaaaaaaaaagtcccagtacttatccaatctatatatataggatgtatatatacatccgttgtttatttgaaataaatgcaactgaacattgcattttaaatgcatcctgcattttaatttgctaaatatggcaaacctatgtggagaaccctgtggccgcctcctataacgttcttcacccatcttcctagatttgcacatctcctccgtgtgccagctgctgcagctggggcgcagagggaggggctttgaggaagcagagcgaccctgcctcagaccaaccattccggcctgtgccccatgcacaccgatgggacagagacgggctgagtggggctctggggaattctggatggcaggatgtgggacgtgatgattgcagcggtggcacgtttcaggttgcatgagacaaatgcagctcaaacggattggaggttaaaaaaagagaaagaaaactttattggcttgggtaactgaaaagaaacagcagcaataaacaccagaagctgaagctggacaccttggggcgtggttggttggatccgggagcacaggggccccaggcctggcccgctgtctgggcttcgcggacctctttggtttccatccctccactgtggggaataaaggccactgcaaggccaaggccaccctcacttcctcaccctgctattatttccctgaatctgattggctcacctgaaccaatcacaggggccgggcaggggtgggagttctgattggccagtccagagtcacatgtccactcctggagcagggcggaaccagctctcataaagcacgtggaaggagaggacggaaggggtgctctattctcccttcaggacagactgggtacagtgactgcagacaagggtgggtgcccagagccaaaataagaggtctggaggaagggtccaggtagccacaggcattccctcatgctgtgttcaccactgtccagagaataagataacccaaatttctccagcttcaattaccatatcgcatttaaccctcacatgaatctcatagggtaggtgctggaaatggaagatagacacatatgtaaatgtgtgtacatgcttccaagaggatatacgaatgcataaatatgcatttcttctctaagaatgaaatgttggctgggcgtggtggctcacatctgtaatcccagcactttgggaggccaaggcaggaggatcacttgaggccatgagttggagaccagcctaggcaacatagcaagactccatctctacaaaaaaaaattaggtgtggtggcgcaagcctgaggtcccagctattcaggaggctgagacaggaggattgcttgagcccaggaggttgaggctgcagtgagccatggtggtgccactgcactccagccttggtgacagagcaagaccctgtttcaaaaataataatgataataatcatcaaatgtttatctcactgaaatgcatttccaaatacatttattaaagaataaatcctcaacttaaatggaattgtccatccattgcactttgtcctgtaaaactttttttttttttttgagaccgagttttactctttcccccaggttggagggcagtggtgtgatctccgctcaccgcaacgtccccctcccagtttcaagtgattctcccgcctcagccccccgagtagctgggattacaggagtccgccaccacacccagctaatttttgtatttttagtagagactgggtttcaacatgttggccaggctggcctcgaactcctgacctcatgatccacctgcctcagcctcccaaagtgctgggattacaggtgtgagccactgcactcagcctgtcctctaaaactcgtgatgccaaggcgaaaaacattgaccaatccaaacacccaaagacctccttaactataaagcttattttcatttaatgagaaaaatatattatgaccctttaggcatcagttcatttcaagcgaatccttctgtggtaaagacaaaatgagatgaaaaattaacgagagctcttaaataaatcgtaaaacctgttaaactttctctccaggtggtgggttgttcccagtgctataaaagttcagtataaattccaagcggttttgaggaacacttccacctggtttcttcttgttgctacaggagtttatttatccgggacagtttttcctgacattattgcacacagtaaaatgtctgaggctgctggttattttattttattttattttattttattttattttattttattttattttattttatttttcgagatggagtctcgctctgtcacccaggctggagtgcagtggcgcgttctcggctcactgcaagctccgcctcccgggttcacaccattctcctgcctcagcctcctgagtagctgggactgcaggcgcccgccac[184 bp omitted]aaggggctgcttggagaagtggcaccagtcttcgtgaaggtcagacagcctgggccataattctcagccccgtctcctgaaggctgtgcagtgtggtgaggagagagagacaggctttggacccctccgatcctctgtggaatggccagaaatagcacaggaggtcctcaatgtcccagagtaactggcactgggaaaagagcacttaatacagcagcccgtattttatatttatgcaagacagttatttccatgtttgtttgggattctcgacaaatgaaacaacaacaaaaaaacacatcattttaagaaaatacaggctgagccgggtgcagtggctcatgcctgtaatcccagcactttgggaagccaaggtgggtggatcacgaggtcaggagttcaagactagcctggccaagatggtgaaaccccatctctactaaaaatacaaaaaaattagccgggtgtggtggcgagcacctgttatcccagctactcgggaggctggcgcagagaattgcttgaacccaggaggtggaggttgcagtgagctgagactgcgccactgcactccagcctgggcaacagagtgagactccatctcaaaaaacaaaacaaaacaaaaaacaaaatgaaacaaaaaaaaaaacagaaaacaatgtatcaacaaagatatgtttaaataaaaacatacgtaaaataaggcttgtgttgacaaacatgtggccagaggctcacaggaagccaacgcagtgtttccctaggagcgttgattcagtgttccctgatgagatgttcatggtggcttgacagaattaccaggaatgctgagaatcgactcctggttgattttgttgtatatttaacaaaatgtaagcaacaactgcagtgatgaatgtatgccccgattcttagaaaaatcaaaacatgaatgaggtgcggatttgtacagtttccccgatgtgactttcacagcacagttataaagaggggacatttgcactttgtgggtctcaccagtggatgtttttactgctgtgataacttcattcctggcagcaatcagatgatgactttttgttttttgtttttgtttttgtttttgttttgagatggagtcccgctctgtcgcccaggctggaatgcagtggtgcgatcttggctcactgcaacctccgcctccagtgttcaagcaattctcctgcctcagcctcctgagtagctgggattacacgtgtgcaccaccacacctggctaatttttgtatttttagtggagacggggtttcaccatgttggccaggctggcctcgaactcctgacctcaggtgatctgcctgccttggcctcccaaagtgctgggattacaggcatgggccatcacgcctggccggaagatgactctttggataatgtaccctatattgtctgaccctgttagggcaaacacctcacaggtgtggccagtgctaaatgagatgcatgaagccgctaaacccagtgctcagacacataagaagtgctcacaaccgtgagtagttattaccattatggcgattgtctaaagtggaatggagaagtgtctcagtctgggttcgagagaggaaacaggtaaatagaccccacgccaggtattttatctaccaaagggtttaatgtagggaattaaatgttcacaaaattattgaatgggctgagcctcctgcgataactcagagaaccacacggaactgtcccagcaaggagccaccgcctttgaggactcatctgtagctctgagttccagaacatatccccagagctgtgatccaggggccaaaagctgccacctgaggtccgggaagtcagagaatggccctgactgcctgccgtggagacacctcatattccactgttatacttgccaggaggaacagtgcaagaggggcaagagaagcgggggaatgaaaatgggccctgctggcag[154 bp omitted]taataaaatacaaaaattagccaggcgtggtggcgggcgcctgtaatcccagctactcaggaggctgaggcaggagaatcgcttgagcctgggaggtggaggttgcagtgagccaagatggggccattgcactccagcctgagtgacagagcgagactcgttctcaaaaaaaaaaaaaattgtgttctgtacaaagagtcacaccacaacagcaaaaaattcaacaccttccttcctctgacaacatcacattctttactgctacttccttaccattgaaaacgcaaccctgcgctatcttcctgccttcagggcaaaaattaaagagaagagctgggcatggtcgctcacgcctgtaatcccagccacttgggaggctgaagcaggaggatcacttgaggccaggagttcaagatcagcttgggcaacataacaagaccctatctctgtaattagaaaaaaaattgaagccgggtgcggtggctcacacctgtaatcccagcacttatgggaggccaaggcgggtggatcacaagaggccaggagttcgagactagcttggccaacattgcgaaatcctgtctctactaaacatacaaaaattagctgggcatggtggcctgtgtctataattccagctactcaggaggc[137 bp omitted]tgcattgcccggcttcttaagccttcattagaactgctctccacttcccccaacccccggcagagccctctagcacaagccctaacgctctgaaaggcctcttctgactctttgtacagggatcccctggaatgcgtcctcccttgctgaaccaagataaataaacctcactgccagtggttcttttggcccttgatcggctttccgcatcttactcgagtgcacttaattagcaaagcccagttcagcccagaactctagctctccagaggtctgggaaatgcagcttcaatctccaaccggagagatttctctccagagagtaaagggctggaagtgggggcgagacggaagccacagtatcaacctctgagaagccgcgttcattcctgccagacattgcgagatacagttgggaagaatttccaaggaattcttctctgccttggcagtgagggtaaggtgagcttgactcgctcctcctgtaggccctgctcactctctgaacatctaaggaagaggatatatctggccggtggaaaacctgctgccggagctgggtgg[133 bp omitted]cctccacctcttaggttcaagcaattcttctgcctcagcctcccaagtagctgggattacaggcatgggccaccatgcccggcttatttttgtatttttagtagagatgtggtttcaccatgttggccagactggtctcaaactcctgacctcaggtgatccacccacctcggcctcccaaagtgttgggattacaggcgcacaccaccatgcccggctaatttttgtatttttagtagagacttggtttcaccatgttggctagactggtctcaaactcctgacctcaggtgatccacccacctcagcctcccaaagtgctgggatcacaggcatgagccaccgcacctggctagaatgcccttcttgagcctcagtttcctcatctgtgagagagactcaggacacctgctgctggccttaaaacccgggtctcttgctgtgtcacctgggaaagtacacctgctccactgagcctcgattatcccaaccgtaaaatggggtgattctcaggccgggcgcgatggctcacgcctgtaatcccagcacttcgggaggc[272 bp omitted]tgctgcctcgccgggggagcatgagggggaagtcagataatgggcaatgtgatccatcattaagcaattcgttcattaatttcattatcctttctcaaacgtttcctgttgcctgggaagccaaagatgactcaggttcagatccagccccctgggagcctgcactgctagacacagactgacatccatacgccatccccccttctgctggttcttcccctttctgctggttctccccctcacacgctcactcagctcactcatgcgtccatcatccactcacccataaacccaacccgagcctccagagatgaaccaaaccccatccctgccctgggggatcttagtgcttcaaagcaccatacaaagagaaaaaccttaattattatttggggtaataattatagcagagctacaaaggagccgagaagctagaaggtatgagctaaatttgctgtcaaaggaattctcgccctcaggcctgggaagcagggtaagaaccacttgccttcactcttatttactcattcacaggcaggccccaagccaggagctgggtacagcaggcaaggagggttggtctctgttgctgagtcgctcagcatgaggtgggcggagcagtcacccaaaaatagtatatgaaatggagaaagagggggctctgcggaagctccagtgaggcacttggtccagacttacaggtgtgggggtggtctgggaaggcttcctggaggaggggacgtctgatcacagagtattatatgatgttaccagatgaagaagtggaggaaggacatttccaggaagtcgttccttcatttcattcctcaccaagatttatggcccacttaccatacattaggacctgtcctaaacgctggtgtgccaacattgcacagatcgtcaaggtgatatttatgtaaacaggacccaggacaaaattaaaatgcagagccctgtgtttaaaaaaaaaaaaagtattaagaatttcaagctgggtgtggtagctgtaatcccagctactcaggaggctgacgcaggaggatctcgtgaggccaggagtttgtgag[212 bp omitted]gaggcaggagaatggcatgaacccaggaggtggagcttgctgtgagccgagatcgcgccactgcactccagcctgggtgacagggcgagactctgtctcaaaaaaaagaaaaaaatgtcaagatagccacagctgggcattcaaccaagtgcagggcagcctgcaaccacacaggttgcatcccatgaagctggccccggatatgtgtgacttgctgtcacttttggcttcaacaacagacaacttgactcaaaatggcttgaggggacttactacttcatgccaagagaagcctggaggtagggcaggtccagccacggttggttaaaattcagctgccaaaccatgccatgaaggatccaggttcctccgtctcacctcccttccatcctaagtgaggagctcccactaccagccctcatggtacccaggtggctgccacagcttgaagtgtcacctgcagacagggcagggctccagggcaactgtttcttcctgcttatcagttgcttaagagttgggaaaacctttcccagcagtgccccagcaaatctgccttcaggtttcattagccagaatagtgtcacatatgtgagcgtcaaccaattgctggcaaggagaaggggcacagcaaaattggcttacaccaataaggacctgctcctggtcaggcagggtggctcacactggtaatcccagcacttcgggaggctg[135 bp omitted]ctgaggcaggagaatcgcttcaacccaggagacagaggttgcagtgagccaagatctcaccactgcactccagcctgggtgacagagcgagattccgtctcaaaaaaaaaaaaaaaaaaaagctaaaaaaaaaggacccgctccttattgggcccttgggcccttattaaccacgctcacccccaatcccaactctctgagtgtgttatgacctccattcaagtgaagacgccgatgagctgagatccccaggctctctcggctggggcatgttgggtgggtttggagccctgccctcacccactgtgctaggccctcaactctggctggacactgattctgtgtactctgtccaccctcggatcctttgtgcccatacaacatttcatctgtctcattataggtgtccagtttgtatgaagtgaacaaatgctgagcagacaatagccagtagtgaaacaagctgtttttgttgcacggatgtggggagggagggaagagtcaactttgcatttgagctgggcttgcttttatcagcgactccactggagttaagtaagaatagcaagtgtttattgaactcgtactccctgccaggtagccttccgagtgctttgcgtgtattaactcatgaatcctcccaagcaccctgtgaagcggcgactattctagagtgcaggtagaaggtaccgatgcataggagtgcgcctttgcatcccctggaggccttgttgaagtaaatcgctgggccccctgctagagttgctgattcagtctgaggcagagaccgagaatctgcatttctttttttctttttttagacggagtttcactcttgttgcccaggctggagtgcaatggcacgatcttggctcaccgcaacctctgcctcccggttcaagtgattctcccgcctcagcctccttagtagctgggattacagggatgcaccactacacccagctaatttttttgtatttttagtggagatggggtttc[142 bp omitted]gcagctggtctggggactacactttgagaactgctgtgttagaggaacttaaaagagtgacccatgaggcctggcgcggtggctcacgcctgtcatcccagcactttgggaggccgaggcgggcggattacctgaggtcaggagtttgagaccagcctggccaacatggcaaaaccccgtctctattaaaaatacaaaaattaactggtgtggtggtgggtgcctgttgtcccaactattcaggagtctgaggtggaagaatcgcttaagcctgggagaagggggttgcaatgagccaagatcaagctactacactccagcctgggtgacagagcgagactcagcctcaaaaaagaaaaagaaaaagaaaaaaaaagtggccaatgagttgaaacatagtgatgaagaaggaaacggtgttggatcgagagcctgtgtgaaccctgtatatgacatgcaggcacctggccaaccaggaagaggtggctggaatattcctccggatctgcctgccaagctgtgtgccccggctcagttctgcagtgcttctgagggccatgcttttctaacacacacaaaggcactctataagctaaaggagctctgggtctgaaggcacatcatgtgggactgtgcaggctagcgacaagggtttgcaatggagggttttaagcaaa[152 bp omitted]gtctctattaaaattacaaaaaaattagctgggtgtggtggcgggcgcctgtaatcccagctacttaggaggctgaggtaggagaatcgcttgaaccctcgaggtggaggttgcagtgagctgagatggaaccattgcactccagcctgggtgacgagaaggaaaactccatcttaaaaaacaaaattcctctgataaatgggtaaacaaaatatggtctgtgtatgcaacagaatattaggcaatctttaaaaggaaggagattttgacatacactacaacatggattaaccttgaggacattctgccaagttaaataagtcagtcacaaaaaacaaatacggtatgattccacttacatgaagtattaatgtggtcaaaatcacagaaactgggctgggcatggtggctcacacctgtaatcccaacactttgggaggctgaggcaggtggatcacttgagaccaggagtttaaacccagcctgggtaacatggcaaaacgctgtccctacaaaaaaaagaaaaaaaaaaattagctgggcgtggttgtgtgcacctgtagtctcagctactcgggaggccaatgtgggagaatcccttgagcctgggaagcagaagtcacagtgagccaagactgagccactggactccagtctggccaacagattcagaccctgtctcaaataaataaattacagaaactgataacagaatggtggttggccaggagctcgggggagagaggaatgggtggttcacatttaatgggtacaatttcaatttgggaagat[134 bp omitted]acctccaccttccaggttcaagagattctctggcctc[220 bp omitted]aatgattaagatggtaatttttatcttgtatatattttaccacaattaaaaaaaaaagatccctttggcgctgtgtggagcaggaactgaggggcaggaggcagaagaggcgagagtggaagcatgacagtgtctaaagaggccatggggacttaaaccaggtggtagccatagacgggagagctgtggacagattctgcatctattttgaagacagagccaataggacctgatgatagattgcatgtggatggtgatgaaaaagaggaattggctgggcatggtggttcacgcttgcaatcacagcattttgggaggccgaggaggcagatcacttgaggccaggagttcgagaccagcctggccaacatggcaaaccccatctctattaaaaatacaaaaattagctgggcatggtggtgcacgcctgtagtcctggctactcaggaggatgcagcatgagaatcacttgagactgggagtcggaggttgcagtgagctgtgatcgcaccactgcactccagcctgggcaacacagccagaccctgtatcaaaaaacaaaacaaaacaaaacaaaaaaccaaaaaaaaaaaaagaaaaaagaatcaagggctgcttttctatttttggcctcaacatttgggtgaagatggacttgctttctaagatggtggagtaatgggaaggaacaaatttcttcgcaaggtgggggagagagtgaaaaattatctactgcccaccttaggtttgagatgcctattaagaaatccaagaggagatgtcaagtaggccatcggatatgagtgggaagaagatcagcgtgctctaggagcagaaaggaggcatgactggaactcattaaacacgaggagaagacagtggtagacaggtgggccagggcagattaggccaccgtgggcaaactggtcacaaagttctgagtcagccactcatcgcttgtgaaacctggggaaagttgttcatttatgaatataagacgaacaacttccatgtaatgaatgcttgttatgggtaagccactgtcttcgtttttatggcgcggagtcttcagatcagccggggaggtggaggatgggagggggattctcttatccttgttgtacggaggaggaaatacgctgcgggctggggtagggcttgtatgagccataatcaggtctggaactgtctagataaaaacttcagctgatctcttaggatgtctgtctgctctaaaatccaaatatgcttcttcacagttctgagatgcagaaactgaggcctcaggacggggcagtagtctgtccaataggggcacagcgaggacgcgtggcaggtagcgctgtcccccaattcaccccaggggaaactgaggctaaagagagggcggtgtcctgtccaggttcacacacaggaagagccaaaccgaggcccccgcgctggccccctcctgagccactgcccaccccggaacaggagggcagcctgctcacgtcctgattcctggcaccgacatcggcccttaagttctgcccgggtggagagggaggacaaaaaaaaatgcgatccgtagtcaaggagacgtagcctgcactcctgattggcgcagaactctagcctggtctcctcctcctcctcctcttcgcttgccagcttctagagctccggaggccccacctcccaaatgcccggcggtgcccggcctcccctgatctccacaacaacgccgccatggctcctcctcctcctccctctttttttcccggcacttctgcgcatgtccagggcccgcgcgcagaccactgggaagcctcctcgtgcattctgggaaatgtagtccaaagcctgtcgcgctcagacagcccgcgacatttgcgccgtcaaggccaaataggctgcagacgacgctttcgcgtatcttgggaaatgtagttccagtgttggcgaagacgccacgcggtgacaaacaggagtaaggcggtccccaggcgagggccaattggcagccgcctttgccgcgatgcttcctgggagttgtagttcggggtgaggccggggcttcatggggagttgttgggctgaacgagcggctcggagtatgggattgggggagggggacgggggagtttggcgcaaagcctgctggggcatggagtcccggcgagctttgtgcgcatgtgcggggaggtgagggggcttggggggcctcgcctgagagagtgaggtgagcgaggggggaaggagggagggattgggtgggggcggttggacgagggagggaccagaggttggatgggaagaggggcgccgggggcctcaggagggaaagatgggagacttgcggggaggggaggagaagggggctgagtgatggggaaggggctgggagagggaactagagggggagggacttggagagggggaggggtggatagtgggagggggtcgtggatcctcgaggtcctgaacgcgggagagaaatgctgagggagaggacgggggaggggcgcctgggggagggggaggggcgggacgggggagggacaggtgggggaggggaaggggaccctagcagagggtgggctgtgagatgaaagctgagtgggaagctggaccctacaaaggagtctgggggcgccgggaccggaccccttcggaaaggtttgcgggaaggggcttccggggacgatggttattgttgtaacgtagatacggcgcaggtggctcgttttgcgcgctgcttctacaagtgcaacttttacagagttgtgagattcctgaagataagaatcgttgctctgttttgctgctttctcagtgcggagcatctgcctttttagcttgttgcaaggcattattaccttcggtaatatgtgtaaagtgcttagaaactctgtttattgtcaaatgaagttgacccccgccacctctaccccagtcaggatggagtcaccctcctctatatccgattttaacgcctattccaatgtatacttagtattttaatctgcgtgcgtgttcatagcagtgtcccctgggcacctcgcagggaaacttcgacaaagtaaccctaagtctgactggacacttactagccaggtgtggttctcagcatttttgttctccttctatcactttacagtcaacgaaatggagatacagggtattacaaaaggtgccttgtacctcgtccaaggacacagagctggtaggaggcagagctggaatttgccccagagcctttgtgccgtaggtaaatatttgtccagtgggccagcggctctcaaccaggagtggttttgtcccccaggggacatgtggcaatgtctggagactttttttttggtttttccaacttgggaagtgctactggcatctcatgaaaagaggcagagatgctggtagacatcgtatgttgcacaggatagcccgccacgacacaagtgccattaatgtcgaggttgggaacctagagtagacaaaccggtctttgtcgagcacttagcctttggaggctgcttctaactcctgctcccagcagcctcttgagaggaaggagctcttgttagtcctgtgtctcaggtggagaaatgaagcacagagggggtaagtcacacgtccacagtcacactgctgatgagtggcagagctggaagttgaagccaggcagccagactccacagcctcttagccatgatattaacccagcatatgtgggtgctggtgccggggtactaggtggaactggtgtggactctggagtcacatctgggtcccatttgtggctccttcactctctgagcatctccctatggtaagaggggacccatctccccagctcacaggtctgttgggaaggttgggtggggcagtataagacactagccactcagtggctgtcttcaaggcatccagggtgcctggctctggactggactgtgctttgcggacacagacagctagacagcagggttacagctgttgaatgcacatagcacagggcgctcattggatggtagggtggattgacatggtggaaggcccttacttaacagcatgtgctttcttgggagcaggccttgtgctggatggccccaccgacccagtgaagagctggacttggtcactgccccagagagctcactttctggacagcccagggtgtagtgacctgtgatcacctctgagattgcaaacagggtcagcttgatggcctgtggcattgctctctggcggaaattcctccttagtcccagagggatcttttttatagcagagcaggcatctgtgtggcttttgagacttggatctggcctgggtcttccgataagtctttctgcctgctcccaggttcatcagcccttaaactgatggatgggtggggtgggaggtgatgctgtggcctggctgtggatgtgcaagtccaggctctgccacgtgttagctgagtgactttaggtaagacatctccccttgctcctgctgcaacttgggggtagtaacaccaacctcatgggattgatcagcctgtaaagtttatttgagtgctagccagaatgctggggttggaatatggagtctctcgcccacatgaattgtagtgaagaaagtcagcacacagatatcgtaacactagatcttgttaaatgctgaaagaaaactaataagggtgacgtcttagcaactgggggaagggcacgtgggtgcagcatcggagggggtgatctggggaggctctccaagggggtaataattgcatggaggcctcagtcatgagaaggagtcaggtaagcaaagattggggggaaagagtgatccagcgggaggcagcacaggtgcagaggccctgtggtgggcactggccttcggtccaagaagatagaaagtgagccagaccgggcacagtggctcactcctgtaatcccagcactttgagaggctgaggtgggaggatcacttgagtccagcagtttgagaccagcctgggcaatatagtgagaccctgtctctacaaaaaatataaaaattagctgggtgtgttggtgcctgcctgtggtcccagctgctcaggaggctgagccaggaggatggtttgagcccaggaggtcggggctgcaatgagccgagaggtcatgccaccgctccagcctgggcgacagagagagaccctgtcttaaaaaaaagaaaaaagaaaaaaagggatccattgtggctggagtatagagaatctgggagcaggcagagatgagaaagtagggctgggctgcatggtctcatggccatagtaagcaatttgggttttgagcatcacaggaagcagttggagggcactgagcaaggaagtgacagggatttacagtgaaaaagtttttgtgatcactgtggagtgatttggctctaggtggcgagagtaggcatacacgggtcttgtggcagccgtcccagcaatgagatgacgtttgtggttagtgacatggcggtcaggagcccaggctttggttgtatcaggaggaaaattgtctgaacacagacttcctctcagacctcaccggctagaagcagattatgtgcccaccctctgccttgtggtcaaggggactttgctatatagttccttatgatacagtccaagctgctgtaatgaagagaccccaagtacagggctccacataggacagaactgattcttttctcccataatactccagaggtgttctggggcgggctggcgcctgagccccatggggtcatcagggtcccttctgtcttgatcttccagtgtccttgaggtcaggggccggcagtcttgtcctgtaaagagccagcgagtgactatctttggctctgtggacagccttacaggccacccaggccctgtcacagccactcggtagctccaaggcggccgtggacagcgcgtgagcaagtgggcgtggatgtgcgccagtgagacttaagtaaaacaggctgcaggccagattcggcccaccagctcagagaccaccatttctcaaatgctttgaagtcaggactcctttctgccttcaaaattactgaagaccctaacatgcttttattgatgggagtcatatctattgttacgtatcatagtagaaaccaaaacagaaaattgtaaagtatttattaatgcatttaaaaatggcaatcacggctgggcgtggtggctcatgccggtaatcccagcactttcggaggccaaggcaggtggatcacctgaggtcaggagtttgagaccagtctggccaacctggcgaaaccccgtctctactaaaaatacaaaaattatccggacgtggtaacgcacgtctataatcccagctacttgggaggatgaggcaggagaatcgcttgaccctgggaggcggaggttgcagtgaaccaagatcgcaccattgcactccatcctgggcaacagagcgagactccatctcaaaacaaaaattaaaaaaaaaaatagagacaggagagctcgctgcctctctctattctacgccatgggaggacacaaaaggaggccgtcggcagcctggaagaggtgctcaccagaacccgacagtgctggcacccagatcgcaaattcccagcggaagggactgggacaggccgtcatagctgtcatagcggagcaccgtggactgaactgctatgagcttatttctcagttctgggagcgggaagctcagaatgccatcatggtcagttcctggtgagggcctctgccaggctgcaggtggcctccttgctgtgtgctcctgctggcagagatggacagagtcccggtgtccctttctcttataaggccacagccctattaggcccagcccttgtgacctcagttaactttcattaccagttaaaagcttcgtctccaaatacggtcacactggggtgagagcttccacatgtgaattttgggagacaaattcaggccacagcagttagttggggtggcttctgagtaggctgcaaagtgtctgctcccagggtgtggggtgcacggccccacaagtccagtgagggtggtgctgatggtgacctgctgctgccaggcctgctgcaagctctttctgtgttttctggttgaatcctcaggacaggctgcgggaggagctgcaggactgaggtacagaggccaggggcccagggcaggacccagcctggacttgactccctgggatcccaggaagggcacaccctttcctcaccacccgagtgagcgctgccccctcacagagacctctttgccccctgggccaggcagagcaggtgagtgctttatcttacaggggaaaccgaggcacagaggccgggcctatcctgggtatgtgggcggctcagaagcgcgggtcccaggccgggtgcagtggctcacgcctgtaattcccagcactttgggaggccgaggtgggcggatcacctggggtcaggagtttgagatcagcctggccaacatggtgaaaccccatctctactaaaaatataaaaattagcaggcgtggtggcggatgcctgtaattcccgctactcaggaagccaaggcaggagaatcgcctgaacccgggagctgaggttgcagtaagctgagatccgccactgcactccaacctgggggaaagagcgaaactccgtctcaaaaaataaaaagtaaaaaaaaagagcgttggtcccattgtgagtctgggcaccgcgggcagggtctcggcgggcaggggtctcaccggcttgttccctgcaggcgctgcggtccgggaggccccatggaggtggcggtgcccgtgaagcaggaggccgagggcctggcgctggactccccgtggcaccgcttccgccgcttccacctgggcgacgcgccgggcccgcgggaggcgctggggctgctccgcgccctgtgccgggactggctgcggcccgaggtgcacaccaaggagcagatgttggagctgctggtgctggaacagttcctgagcgcgctgcccgccgacacgcaggcctgggtgtgcagccggcagccgcagagcggggaggaggcggtggccctgctggaggagctctgggtgagcctggcgggactgcaagcggggaagggagaggggaaggtgccagggaagccaccaggaagcccagggaggagcaccactgaacccctgaaaaccagtgtgactcgcggtggggaggctgcggtacaggctgcggtacagcgtggagggacagtccacgtgcggcaccctccatccccacaccagctgcaagtcaggagggccccaagaccctggcatacttgcgagttctctaggactcacagccgtgttcacggtcacggcttatcagagaaggacgtgctggaagcagctgggaagaaggccacgaaggctccagggagcgcagttaccagctgtcctctccccgcaccccgcccgcacgcagggggtcttgccggccaggaattctcctcagaccgtggtgtcctgggttcttactggggactcctccccgttctgtgtggctgacctcagcctcccgccccctgaaagtcaaggataccccctggtccaaactctaccccaaattcatcttgcttttgggctggcctgagtcccccggggcaggcagaccctccttatcatgcgtgaggctccaagggctcagagatgacttcccaggggcagagggcaaagccaggcctctctgggcaggtttggtttcttgaccacacagcaggcaagggccgactcacgttctgggtgaagtcttggtgcacagccacacccacccactcatgtcacctggggctgacacttgccaccgtgatgaccacagagggcccgaggagctggaagtgttgactgcctggccccgtcagggaagttgccagcctggcttagagtcctgtcgggggatgtgttatgtgagctgcacatgccatcttaagtgttctagtcagcacgttaaaaaaaggcaaatttacttcatggaccccaatgtgttcaaaataccatcctttcagtagtggcactctcccatggctggtggctgctgtgtggggcctgggtgatgagcggtgggcagccacgcagagacctctgagaagagtggtccaggccacgagagcagccagtgcaaaggccctgagccacctcgagcggcacaggggccctgagtgagggggtgtttgcggccaggcctgagtccccagtggcaggagggtgaagagtcagagcagtcgcgtgttcctcataagtgcgtaccgagtgcctgctgggtgctgagatgtagcagcagagagggggcatctcggtgaggcaaagcgagcaaagccttcagtccatggcagccgggcggccttccttccttccagagggagcagctcccgtcaaggctgccagtggcctcatccgtctcccttctcatgcggcccgaccagcccccagacactcccccctcttattgtctgggatacagctcgcccctcctctgctcctgcctcctggcacctctgtgctggctctggcttctctatcctcgccctccttccgggtcattgttcccaaaagtgggttgtaacaaatcacaaacgcagcggcttacaaatcacaaacgcagcggcttagaaatcacacaagtctgttacagttctggaggtcagaagtccaaaatggtttggtctcatggcccaaaatcgaggtgtctgcagggccacgtcccttctcaagtctccaaaatcaaggtgtcatctgcagagccacgtcccttctcaaggctctaggagagaatccgtttccggccttttccagctcctagaggctgcccgcattcctcggctcatggcccttcctccgtcctcagagtgctgcactccgacctctgcttccatcccccatcactcctccgaccttgacctctgcttccatccccatcactcctccgaccttgacctctgcttccatcccccatcactcctctgaccttgacctctgcttccatccccatcactcctccgaccttgacctctgctttcatccccatcactcctccgaccttgacctctgcttccatcccccatcactcctctgaccttgacctctgcttccatcccccatcactcctccgaccttgacctctgctttcatccccatcactcctccgaccttgacctctgcttccatcccccatcactcctctgaccttgacctctgcttccatcccccatcactcctctgaccttgacctctgcttccatcccccatcactcctctgaccttgacctctgcttccatcccccatcactcctctgaccttgacccacttaggtcctgtggtcacttatttatttatttatttattttactttaagttctgggatacatgtgctgaacgtgcaggtttgttacatgtgccatgaaggtttgctgcacataccaacctgtcatctaggttttaagccccacatgccttaggtgtttgtcctaatgctctccctccccttcccccaccccccgacaggccctggtgtgtgatgttctcctccctgtgtccatgtgttctcattgttcaactcccacttctgagtgagaacacatggtgtttggttttctgttcctgtgttagtttgccaaggatgatggcgtccagttcatccatgtccctgcaaaggacatgaactcattctttttcattggtgcatagtattccatggtgtactgtggtcacgtcttaggtcacctgtgatgacattcggcccgtcaggatagttcaggagagtttccccatgtcagtgcttaactccctcccatccacagagtccttgttgccctgagacagcagatgacaggttctggggatcagaccgtgtacatctttggggccattattctgtctgccacagaggcgaggtgaatgcaaggtgaagtgggggtggaacagaaccaacgtggaatctgtgagcctcggggtttcgccctttccagtttccatgactcctcagaacaggacctggcacatgggtgctgtctaggtagatttcagccactgttaccactctgagctcatgccatctgttttgttggcattaaaatgttcttttaggaaaagatggtaaaagtaggtggtggttattgttgcttttaatgtatatatcttgcaaaataaaaaaaaatcttccattcggggatgcagtgagagttctgttggttcagtgaatctaaaagtcgggaaatcaccaggctccaggccgtcgggactctcctgcgttctctgcttgctccgaggcgaacctctcactgtggctctgggatgtctttagcatctctcttgtatctgttactctctctttttaataagggcagatctcaggttcagagccttctcctatcagtgtccacacagacgggaataacactgccgtgagtgatggaatttcccatgacctctctctctggcacatgatactggctttccatttccagcaatgatacaacatggtcttaagtcagtgttattttagttttaggtaaaagtaaagaagagtaataagagcctgggcgatagccattgtagctgacggtggtgtatagacagctgacatctgggggcgctgctgtggattggggtttcttggcatctggtctgtgggagctgacggtgacgcatagacagctgacatctgggggcgctgctgtggattggggtttcttggcatctggtctgtgggagctgacggtggcgcatagacagctgacatctgggggcgctgctgtggattggggtttcttggcatctggtctgtgggagctgacggtggcgtatagacagctgacatctgggggcgctgctgtggattggggtttcttggcatctggtctgtgggagctgacggtggcacatagacagctgacatctgggggcgctgctgtggattggggtttcttggcatctggtctgtgggagctgacggtggcgcatagacagctgacatctgggggcgctgctgtggattggggtttcttggcatctggtctgtgggagctgacggtgacgcatagacagctgacatctgggggcgctgctgtggattggggtttcttggcatctggtctgtgggagctgacggtggcgcatagacagctgacatctggaggcgctgctgtggattggggtttcttggcatctggtctgtgggagctgacggtggcgcatagacagctgacatctgggggcgctgctgtggattggggtttcttggcatctggtctgtgggagctgacggtggcgcatagacagctgacatctgggggcgctgctgtggattggggtttcttggcatctggtctgtgggagctgacggtggcgtatagacagctgacatctgggggcgctgctgtggattggggtttcttggcatctggtctgtgggagctgacggtggcgtatagacagctgacatctgggggcgctgctgtggattggggtttcttggcatctggtctgtgggagctgacggtggtgtatagacagctgacatctgggggcgctgctgtgcattggggtttcttggcatctggtctgtgggagctgacggtggtgtatagacagctgacatctgggggcatctagtgggagctgaccgtggtgtatagacagctgacatctgggggcgctgctgtggattggggtttcttggcatctggtgtgtggaaactgacggtggtgtatagacagctgacatctgggggcgctactgtggattggggtttcttggcatctggtgtgtgggtcctcgcctgtcctcagagttttcaccgagacattgccggatgagaaggagaggacagccgaggagaggctcctgtactggtagaaagcagtagagctcacctggaaacttttaaaaaatactgtcggccgggcatggtggctcacgcctgtcatcccagcactttgggaggccaaggtgggcagatcacctgaggtcaggagttcgagaccagcctggccaacatggcaaaactgcgtctctactaaaaatacaaaaatcagctgggcatggtggcacatgcctgtaatcccagctactcaggaagctgaggcaggagaatcgcttgaacccaggagctggaga[131 bp omitted]attcgggcctcagcttcagtaattttttaactgaatgtctccattctcctgttgaaggacatttgggttgattccagggttttgttttttttttttttttaatagagctggtttacgtctctgaataggtttctgtgtgaatacacgtttacatttatctagggtaagcgcccaggagtgcagttgctgggttgcgtgacgtcttagtctgtttgggctgctgtaacaaggtaccataggctgctggctgaaaacaacgggaatgtatttctcacagttctgcaggctggggagtttgagatcaaggccaactcagtgtttggtgagggtctcctgctggttcacagatggtggcttcctgctgtgtcctcacagggcagaaggggtgaaggggtctctctggggtctcttgtagaagggcactaatcccattcatgagggctcccccttcatgacctaatcacctcccaaaggccccacgtaatctcattaccttcagggttaggatttcaacatagaatttgagaggcacacagacatttggtctgcagcagtcttctgtccattttcagactgggttgttttcttgccctggagattccttcatgttagtctggatgcatcctctgccagctagtagactttcacattttttttaaaagtgcctcatgacctgtgtgagccactggagttggggaccaccaataagagagagcccgtcatccaggagggggcaggctcttccatttgggggagaacaggggacatttgggaatcacagcctccatggttctaaggactgttcccatctcctcagagtctaggggacttagagaaatatatagccttcttggctacgttggccttgtcgagtttgtttatgacttttttatggtatgtctagccccagctggaatgtagtctcatatagtctcctgtgggttggggccttgtcttttgttcagtgatgtgtccctggagctcaggatggtgctgggcacatagtaggtgctacaaaaatactcgttgagggaatggctaacccttcccagcctcctcttctcctgctgtggagggaatggctaaccgttcccagcctcctcttgtcctgctttgatatacaggatttgacaggaagaccagggtatggtcagcttcctcacttctgtggagagagaatctgatctgtccagaaagatcgaatgacctggctgtagtcactcagcatctggcctcaggcacacaatagggaaaggggatagtttaagacggatgggggcagggcgtctgccaatcggggaagtgcagagaaaagccagtggggtaggcctgggaggtggggagaggcagctccagccagtacctggttagcttgacaggaaatgccccagtcagcctgcgtctcaggtcggaattgaaggggaggccctggggctccagaggcagctgggagcacaggaaaatagcacagggtagctgttcaatgtagaagccaaactcagaagattagcagaggacaggttgataatcaaggtccaaactcaatatttgaaaagaatagtagaatagtgcaaaccttcagcaagttgactaggaggaaaacaagaaacagcacaaacactgatggtggaagcaagcaaagccggggatggagcggatttgacaaccgttgagaacaccgtgttcaacgtacacaatgcattcgaagtcctagatgaaatggacagttttctaggaaaatataaatcaccaacatatgctcatgatgtagtggcagatgtgagagtctggaaaccagaggggggagatcaaaaggtgatgaaagaccttcgcgtatagaaggcactggattccagcactttatgtgtaagttctaccaggcctccaaggaactgatcattctcatctgttcttttttttgaggcggagtctcactctgtcgcccaggctggagtgcagtggcgtggtctcggctcactgcaacctccgcctcccatgctcaagcaattctcctgcctcagcctcccaagtagctgggattacaggtgcatgtcaccatgcctggctaatttttttgtatttttaggagagacggggtttcaccatgttggccaggctggtcccttttacacaaacttccagaacacagggaaggtgttcctcagctcactggcaaggctgccacccccacccccacccccaaccacctaacaggacaaggacagcacaggaaaagaaggttgcagccagtctcatgggaccctcaacagaacatcggcagcttgattccgcagtgggtggacagacctatgtgctggggcaggtggagcttagcccagatacacgaggatgcttcatccttaggggatcctcagcagaacatcagcagcttgatcccacagtgggtggacaggcctatgcactggggcaggtggagcttagcccagatacacgaggatgctgcatccttaggaagtctctcagttagtacacagacttcaaagccgaccagagtctctcagttaaagtacacagacttcaaagctggatatgagtcctgcctccaccttttccaagctgggtgaccttggacgcatgtctgggactctcagagccttggcttcctcagctgcaattttggaatctcgattcctgagccctccagggatgggtgtaaggagggctccatcaggcagtgtgttcctggctgtgccaaattggctcagtcagtcacacacagggtcacagcttattacagagaaaggacacagatgacaaccagccaagggaagagatgagtggaatgggtggaggaaggctctgtgctcggagctcccaactgtcctcctgccgtggagtgtggacggcgctaactcctcccggcaacaacgtgtgacaacctgcagggggtgctgctggccaggaacgcttccccgagctcggcactcggtctctgttggggttgtgtgtagatatgctgaccttcacctccatccctggcagaggccgagctgatgcacatggcccagacccccaaccctgagtcacgctgtgggctcagcccacccgggtggcccagggccccaggtgagcagaccctgccatcaggcagtgtgttctgggggcatagaggtgaccctccctggagccaagggcagaggccagacctctctggacagggctgagcctcactgcacagcagcagcatctcgtcagtctccacgcagcctgcagggtccgtcctgggtactggtgtcatctcagggaaggaaagcagcttgcccgaggtgacacagctggttcaggggcagggggggatctgtggaaaaaacgtactcaaagtatctttttctattctcagcatcagtgaccacagaagacgtctgtgaccaaatgttggagggggtgtcccctcacataccgaacaagcaatcaactctgcagcagacacaagctgggtgtcctctaatgcatttccaacatggtctccctggagacagtgccagatcccacaggttgagggctcacatcccaagactgaccccccatttctgatgccagtcacaagccccaggttatttcatctgtgcttccaactgacaggctgtacatcgggctcccacagcccttcctctggttccgttaatttgctagtgtgctcacagaaccagggaaacatgtttaccgatttattgtaaaggagattttaaaggataccagtgaacagccagatggagagccacgtatggtgaggtctggaagggttccgagcgcaggggcctctgtccctgtggacttgggatgcaccatcctcctggcatgtgggtgaggtctagtttaccttgctgtccacctccacgagttcagctctctggaagctccctgaaccctgtccttttggccttttatggagacttggttgagaggcataactgaagcatggacagccatgtagaaatgtgattagataaaacgggtgtgatcgaatccgagtagaccgagcggggaaacctcgcaaggcctgtgtgttcagacccttcttggcctcctttggctttctttcctccagggtaggggcaggaccccttctgaaggggggtgttatggcccacaatcagacaaattaggtcagaaaaattttttatggccagaggtgggggaagatttaaggatatttttagtttttaaggcctgccttgtggagaaagaagagcaggtgaaagtagggcagaaggtcagggagagactctttttctgaggcctaaagcttcccatcgttagaacaagaccgtaacaagggctgtgggagtcatgagccaggagccgtggacagagcccaatgtatacgtatcataaaatcacagggagggttaggaccccggggctgctccatgctccccccttctgtgtgcctggccccacaaggcgcgcctgtccccgcatgggtgtgccctggatgtctcttcctgtggacaatgcctggccagcgtcccctgtctctggggcctcaaaccaggaagttccccgaggaatgggtggatctcaggcttttctgtgcccaagatctctgggagaaccgtctgctggcacggcttcccaggctccactctcaggtgtgtcaaccccggtgcccttgagctgaggccaggacagcacccctgcccagcctctgcctgtggctgacaccacacaagggtcatgggagccccgccaagggccaaggagctggagggtggtccagggtggtgctctgggcccgagtgagactgtgctcttctgactctctccgatgggccccagagcccatcacggtcccacagccaggttgcgaggcacctaggatctagtcagcgttgtgccaagcccccatcctcatgcctcagctgcctgagtcactgggattacagtcatgagccaccaggcccacgctcttgtattttgacccccttatttaggaaacgttttcttgtctgtcagagtgagggcaggtggtttgcccctgccgctttgcttttttttttggagacagagtctcactctgttgcccaggctggagtacagtggtgtgatctcggctcactgcaacctccgcctcccgggttcaagtgattctcctgcctcggcgtcccgagtagctttgattacaggtacgtggcaccacgcccagctaatttgttgtatctttagtagagttaggatttcaccatgttggccaagctggtctcaagctcctcaccttgtgatctgcccgcctcagcctcccaaagtgctgggattacaggtgtgagccacctcgcctggcctaggcattgctaattttcacaccagtgattgctttgtgatccacgtactcctctggccaaaaatatttgaaacggggaaaaggtgtggtgcgtgacttagctgtcataggcaccagaagaattctcatccctttcccttggggacgtggttttgaggaattatgtagtagggcgaagaaaccacaacgagttggactgaaactttttaaatttttggtcttcctggttggtgccgtcctgcttggcagctgttctgctgtttcacaccaagaaaagttgtttctgaacttagtttacttttttcccaagttaaaagtagcttatatattctgcattttgttaaggagcttgcactttatccaaagggcaggacgaagctgatctgagacaggtgtattagttatttcttgcttcctgacaagtcaccccacactcaggggtgtaaacagtaacatctgtcagctcagaaagcctctgtgggtccggagtctgtgagtggcttgggcacgcggacctggcccagggtctcctgtgaggtcacagtgcagtgttggccaggctgtcatctgaaggttggtggcttcaagatggctccctggcagggggttggcaggaggccttggttcctcacctgggggcctctctgtggggcagcttcagtgtcgcccagcatgactgtggcttcctcccagcagggatgggattgcacagctggtcgacggtggttgggagagggagaaatagaggcccttgctcaggtttctgagttcaaaactgtgctctcatttcaggggccagcagcctcccccgatgggtcgtcagcaacgagggtgcctcaggatgtgacgcagggccctggggccacaggtggaaaggaggacagtgggatgattcccttaggtgagctgctggcctctctggttctccccgccagcccccagcaccggggagggggttcagtgaacgatcctggcaccaggacccaggacaaggacagacttggaccccagcccttgaggagccccggggttcggacccaaggggcgggcattgggggtatgggtgggcctcggggttggaggttcatccatccatctatccatccatgcacccatctagccatcatccaccctccacctatccattcctctatcatatacccacccattcacccatccatccctctatcattctcccaggcatccatccatccttcacatgttccccctcacaccaatcccaccatccctctgtcatccatcatcatcacccatctatccatgacccacccatccatccatctactcatccacccatgcacccacccatccatcatctgtacattcatccacccatcatccgtccatccatccacccatcatccacccatgcattcatcatctacccatccatcacccatccgtccatctagtcatccacccacccatccatcatctgtacattcatccacccatcatccacccatgcattcatcatctacccatccatcacccatccgtccatctagttatccacccacccatccatcatctagacattcatccacccctcatccacccacgcattcttcatctacccatccatcatctgtacattcatccatccatcatcggtccattcatcacccatcatccacccacgcattcttcatctacccacgcattcatctacccatccatcatccagccagccatcatctattatgtattgggcattgactgtatgccaggcactactaggtaccgggacacaggtatgaataagaagcccacagcccagccctcttcccaccccaatggtttctgcctttaagcgttccctccctgcctccaccccagcctgtgctgtccttgccccgccctcgtgccgacccagatgctgactctctttcttttcccagcaggcaccgcccctggggctgaggggccggcgcctggggactcccaggctgtgcgcccctacaagcaggagcccagcagccccccgctggcgcctggcctgcccgccttcctagcggccccgggcaccacgtcctgccccgagtgcggcaaaacgtccctgaaaccagctcacctgctgcgccaccggcagagccactcgggcgagaagccgcacgcctgccctgagtgcgggaaggcctttcggcgcaaggagcacctgcggcgccaccgcgacacgcaccccggcagccccggcagccccgggcccgcgctgcgccctctgcccgcccgtgagaagccccacgcgtgctgcgagtgtggcaagaccttctactggcgcgagcacctggtgcgccaccgcaagacgcactcgggagcgcggccctttgcctgctgggagtgtggcaagggcttcgggcgccgcgagcacgtgctgcgccaccagcgcatccacggccgggcagcggccagcgcgcagggggcggtagctccgggcccggatggtggaggccccttcccgccctggcccttgggttagccgcctcccggccagcgccatctcccgcccttggtgctgcccccgggcggtacctgctctctcccagcgccacttggcctcttcctctcctccttccctcccatcgtcctcctccacctgcgcctcccttgtctgaacttcccaacgccttcctattcctttccaactccttttcccccaaatttcactttccttctcaggtctcacctcagccccccccttctccctgatttctcggcctctctctctgtgtgaaggggcctctccctaatgtctcctccttcccccctcttctctctcctgcggcccagcctccctctccctcctccattcctctctccctgcccttttcctgcctgaagagcagaggtgaggacctgggacccctgaggggcaggccaggaggagctcgggcgcaggccaggcccccttggtgaagcagaggctgaaggaaaggggtctgggtcttgtccctaggaattctcctccctcaggagattgggggttgggggaggcagcgggtgatggctctgaagctgaacccagggcctggctgtggtcttcttggtcttgctgccccctgtgacccaaaggcatgggatggacagagatgcctgcccccgtgaagctggttggggagggcagttcaccagcatccatagagtaataaagtcactgtgtgtagacccggagtctgagctctgtctggagtctgtccggcacagccaccctcccagggccgagcgtctggggtgcccggggcttctggggtcagctgtcttggctcccaccacagactctcttggcatgagagaggctctgggagtctgggcacagctgtgggaggcagtgcaggaaatgtgtcctcaggagggctgtccccacctccatcctacggaggcagggatgaggctcctggaagggacctgccgagtgccacactgagtcaggttcgcatctgagcccttcagcttcctggctgggaacctacaggttggtcataccctctgggcatgagttccacatccgcaagtgatgataatggcacccacctcccttgctaaggccactctgtttgactggggtcctgagtgtcagtgttggtaggtcttgggtggcccattctgccacgcaaggaattctctcacctttagctggagccattggccgagggggggactccgtatggagggcaggctttggccagctgcatctttccaggatgccacctcttgtcagctcagcgagcaaccccggttccttctctccagagaggaaatctgtagcctctgccgggtggatgaagggcagttgccgggctttggaaagcgtaggatgagagcgctggtctgaccactcccctgccgcccagtcttggggctggcttcaccctggtccttttggttcctgtgtgcccagcgcctgagcctgggaggggttctatgtcaaaccctccatggttgccgccttgtggctgagcccgccacggtaccaccttgcgtccaagcccccccacggtcactgccttgctctctgcttcagcttctggctcagtgtcaagggctggggcaggtacagcctgtgccgggctgcgagggcatctggaaacagccacctggacggtccagtgcacatcactggagtctaggtctgccttcaagactcaacagtgcagggaagggtttaggtgccaggctatccaggaagggcaagtgaccacaggcctcagcacccacctcctaagacaggactggtagtaatgcccctcctgaaaagggactgtttttgaaaattaaataaggctgggtgcagtggctcatacctgtaatcgcaacactttaggaggctcgggtgggtggatcacttgagctcaggagttcaagaccagctcggctaacatgctgaaaccccgactctactgaaaacacaaaaattagccaggcatgatggtggacacctgtaatcccagctactccggaggctgaggtgggaggatcacttgaacccaggaggcagaggttgcagtgagctgagatcgcaccactgccctactccagcctgggcaacagagcgagacttcgtctcaaaagaaaaataaggtaatgaatgcagaatacttacgggaacttggtgtgtgatctcagcctgctgctttcacactgacaggtgcatgttaaggacgttaccatgcccaccgtgtggggaagaagacgggctgggagaagccgtgtcgtctgctgcagactttcaggaagtgactaagaggcatgagagggagtatgaggtggtgtcaggccagggtctgaggacagggttctgataacagcaaacacagagtgagtctgctgggccagacctttttaaaatccagtttgtttatcatcataaccaaccgatgaggcatgcactgttgttatccccatggtacagatggggaaactgaggcaccaaaagagtaagggaccgggccacatctgtggatctcatcccaggtgtctgggctcacagtattcactccagctcctaacagcacagctgctgcttttgcccattcaggctccatctcttctcttctgaaaagcctcccgggacttctgtgcccctttggggacccctccaacacacacacacacacacacacacacacacacacaccccgtgtctggtctcggagggacagtcggccaggctgtcctgccccactcttttgtgtcactcaagatggacagtcccggatggattggaggatgctggaagaacacccctgcaaaggactagaaacaaggcgagaccagatagatggagatctgactcccgcaccctcctgcacccacacctgctaagcctgggggagctttggtttgacatccgatgacgagtggtgtctgcctccgaggctgtataacggagtggaggatgatcccccccaaacaggagggaaattctggaaggccgaaacaaaacttgaatattctccgcatgggcaacagaaaactttccagagagacaacctagcagtccttcctcagagtgggcggtacttccacgagagtgcgcagcctttcctcagactgcgcagtccttcctcagagtgcacggtccttcctcagagtgggcggtacttccacaagagtgctcagcccttcctcagactgcgcagtccttcctcagagtgcacagtcctttctcggagtgtgcaggccccagccagacagactggcacaggtgcatccgcagaaggtcctgcatagcgctgttcctcatggtgctgcttgggatggcagagaatcagagcaacgtaaatgtccgttactaggagagggggaacgaagaaacattgttcaggaaaagtaccgaaacgtggaagtaggcaaaatgtcaattgtgcagccttctaaaatcatgctcaattgtcttaaaaatagtcctgcctgggccgggcactgtaatcccagcactttgggaggccgaggtgggtgcatcacttgaggtcaggagctcgagaccatcctggttaacatggtgaaaccccttctctactaaaaaaaaaatacaaaaattagccgggtgtggtggcgagcacctgtaatcccagctacttgggaggctgaggcaggaagatggcttgaacctgggaggtggaggttgcagtgagctgagatcgcaccactgcactccagcctggatgaaagagcgagactccgtctcaaaaaaaaaaaaaaaaaaaaggaaagaatagtaaggaaataaacccaacagctctccccaccaatatccactctgatggagcaggtgccatgagggctgtcctgtgactgatacccaccatgtctgttggacactatcacatctacgatctttatccatcaaccccaataccacagaccagagaacatctgaattgtggttttggatgctggccttgactttcttgcttccgtctttattgcttgaggggtgagattgttttaagaacctgctggtggcatgaggtgatttttttttctgcttcctctcctgggggccctggcaccaggggctctgccaggacccagcaggggttagttaattctactcaatttccctgggtgactgcccctcccctcaccccttcctctcccctgctaaagggttccggctctggggttccatacaccaggttcaaacctcaactctgcttcttccttgctgtgggaggaggtcgatgataggagtatcctggtccaagccgctccagtcctggtctctctcacaggtgattgctaactgggtccccaatccataaaagttagctgggtgtggtggcacatgtctgtaatcccagctgctcaggaggcttgagtcaggagaatcgcttgaacccgggaggtggaggttgcagtgagccaagattgcaccactgcactccaacctgggcgatagagtgagatcctgtctcaaaaaaaaaaaaaaaaaacaactagaagtttcctgatggggtggtccctgtctacctcgtaccctccaccctccccagttagtctgcattccaggtccagctcatcacccagttccttcagcccttccttcctccaccccactacaggacttttgcacaggccattggctccacatattaataaaatgttgttctttcttcctgcatttgcctagtgaacacaagagcaaaactccatctcaaaaaaaaaataaataaaaaataaataaaataagggcatgaatcccattcacaaggatgaagccctcatgatgtgatcatgtcccaaaagtcctacctatttactatctattgtctatctatctatctatctatctatctatctatctatctatcgttatatctccatctgtccatccatccatccatccctagactgctcaacagacacgctacctcttaatattctcacgttgggtattagttttcatcatatgaatcttcaggggactctaacattcaatccataacatgggggttacagtgagggctaaatggggggagtccacaagtcatgctcacgcctgtaatcccagtgcttaggaggccgctgcaggctgatcacttgaggtcaggagtttgaggccagccaggccaacatggtaaaacctcatatctactaaaaatacaaaaattagctggtgtggtggtgctcaactgtagtctcagctactaagaaggccgaggcaggagaatggcttgaacccgggaggcggaggttgctgtgagccaagatggcaccactacactccaggcttgggtgacacacagcaagactccatctcaa[136 bp omitted]atggtgaaaccctgtctttactagaaatacaaaaattagccgggcatggtggcgggcgcctgtaatcccagctactcgggaggctgaggcaggagaatcacttgaaccgggaagctgagattacagtgagccaagatcacgccactgcactccagcccgggcaacacagccagactctgtctcaaaaaaaaacaataaaaaaaaaccccaaaaaatcattaaatattcacgattttgggggggcagtggtgagccagttgttaaactgttggtatgttgaaattggccctaatggaatatttacactatgggaattggctaacagtacaaatgcaggcatttattttattttattttaaaaagctgacattggctgggtgaggtggctcacacctgtaatcccagcactttgggaggctgaggtggatggatcatctgagactgggagttcgagaccagcctgaccaacgtggagaaaccccatctctactaaaaacacaaaattagccaggtgtggtggtacatgcctgcaatccccagctacttgggaggctgaggcgggagaatcgcttgaacctgggaggcagaggttgcagtgagccgagatcgcgccattacactacagttacttgaatgacagtgactctgtctcagaaaacaaacaaacaaacaaatagaaaaacacagaaatctagatctttatgtaaaagttttgaaaccctatatgctcgtgattcgatttgcaattttcaaaacactgtgtggaagtttagcccagtgtggcaagcacacgcctgtagtcccagctacccaggaggctgaggttggaggattgtttgagcctgggcagtcaaggctgcagtgaaccaagatagtgccaccgcactccagcctgagcaacagagcgagaccccatctcaataaaaataaaataaaataaataaataaataaagcaagcaagcaagcactgtgtgagctacaatatgaaggaaccaaaacaaacaaaaatcataatgcaaacaaacaaacccaaagcacgtctgagggtctggttttggctgcccgtttgcaagttctgagctggttcctcagtttaccaaagaggagatggaggcccagaagtctgtagtgaattccctgcagccccatagcgggccagtgaaatgtgaggttgtttcctcattgctctgagagttggcattgagtgaagatgagtccccaacccctcctctctgggggatgaagtggtagaaatggctggcagggaggctgaggttggagcaacactgacctttggaattatgggcaggaaatgtgtggggcttttttttttttttagatgaagtcttgctctgtcccccaggttggagttcaatggtacaacctcagctccctacaacctctgccttccagtttcaagcaattctcctgcctcagcctcctgagcagctggaattacaggcatccaccaccattcccagctaatttttatatttttagtagagacagggtctcaccatgttggccaggctggtcttgaactcctgacctcaagtgatcctcccgccttggcctctgaaagtgctggggttaaagacatgagccaccacgcctggcccggggtcttaatcctaactaaatacccaaccttaagcaacagcatacccatgtcctttagagggttaactgtaaccccttaatttgggttcatggtaaggaagaactgatccagggagacgatggaatattcagcacaatggacagagacatttcctccaagctgagttaggggaaagaaaggtgcagacttccccgcccccagtgctgacctcccatctcaggtggggaagagaaataaagcttttgtacacgttttttttgttttgttttgttttgagatagagtctttctctgtcgctcaggctggagtgcaatggtgagatcttggctcactgcaacctctgtctccctggttcaagcgattctcctgcctcagcctcctgagtagctgggattacaggtttgtgccaccatgcccggctaatttttgtatttttagtagagacagg[143 bp omitted]cctcccacttttcattgtttcgtttagtgtatagatggggaattctttggtgagatgcaaagacaaatataggtttacattttgacatcttaggagttttttgtttttgtttttctgagacaggatctccctctgtctcccagactggagtgcagtggtggcatcaaggctcactgtagcctcaacctcccaggctcaagcgatcctcccacctcagcctctggagtagctgggactacgggcacatgtcactacacacaactaatttttgtatttttttgtacatggggtctcgctaggttgccaaggctggtctcaaactcctgagctcaggcaatttgcctgccttgaactcccaaagtgctgggattacaggtgtggaccactgcacctggctgttttttatgaatggcgaactgctggatgacacagaatgtgggcatggatttttaaagcctgcctagctcacaaggggtaaaatgtgtctatttaggaagatatgcccattgacatctgaacaccgaaaaacacctccatgctgtagcccttcctcaaaccattatgatacccagagttattaagaaagatgcagcctcccacagttacatcaacatcctactccaactttccatggagctcattttattttacttttcattttttccaaacctactgtgttgcaggttcttttttttttttttttttttttgcgacggagtctcactctgttgcccaggctggagtgctgtggcatgatctcggctcactgcaacctccgcctcctgggttcaagctattctcctgcctcagcctcccaagtagctggaattacagatgtgccaccatgcccggttaattttttttatttttagtagagatgagggttcgccatgttgagcaggctagtcccgaactcctgacctcaagtgatcccacgcctcggcctcccaaagtactgggattacaggtatgagcctctgcaccccatgagagtagattttaaatgctttcagtacaaaacgatgtctacgagctggtggatgtgttaattagcccaatttaataattttacagtgtatacatagatcaaaacattatgctgtatgccataaatagattcaatttgtatttgtaaatttaaaaaaattttaagaaaaaaataagcaaatacataaataagtaaatagacatatttttaaatggtggtcataataaatgtccctgagaagaggataggaagtcatccacacgtagctggcaagaacattccaggcagagacaatggcagaatgcactctcttttcccactcttgtcaacattctacctgcttttcaatttaactaatatca[132 bp omitted]aaccccgtctctactagaaatacaaaaaaaaattagccgggcgccgtggcgggcaccagtagtcccagctactcaggaggctgaggcaggagaatggcgtgaacccgggaagcagaacttgcagtgagttgagatcgtgccactgcagtccagcctaggagaaagagtgagactccatctcaaaaaaaaaaaaaagaaaaaacaaaagccagctgggcacagtggctcacacctgtaatcccagcactttgggaggccaaggctggcggatcacctgaggtcaggagtttgagaccagcatggtcaccatggtgaaagcctgtctctactaaaaatacaaaaattagccaggcgtggtggtgcacacctgttatcccagctactcgggaggctgaggcacaggaatcgcttgaacctgggaggtgggggttgcagtgagccgagatcgagccactgcactcccagcctgggcgacagtgtgaaactgtgtctcaaaaaaagaaaaaaaaaaaagaaaaagaaaaaacaaaagccataaagatacaactcaggctgggcgcggtggctcatgcctgtaatgccagcactttgggaggccgaggcagacggatcatgaggtcaggagatcaagaccatcctggctaacatggtgaaaaaccctgtctctattacacacacacacacacaattagccaggcgtggtggtgggtgcctgtagtcccagctactcgggaggccgaggcaggagaattacttgaactcgggaggcaggtgttgcagtgagccgagatccagccattgcactcccagcctgggcaacagagtgaaactgtgtctcaagaaaaaaaaaaaaagagaagaagaagaaagaaaaaacaaaagccagaaagacacaactcagcccaccaacatgggagagcatgtcatttcccacctgggcgcctccggtgtacactgtttcccgctttccttctgattcaaggtcacgggaggctgctggctgcttctgcactcttgtttttgtaactggatgtccgggacctttggaaggcgaaggcacctgcttatttcatctcctccccaccgttgtcatgggccaaactccaggatgtccttccgccctggttagctcccgccatgagtcagccctctcctctccacgtgcccccacttgaaccactcctgtgaatgcagcgtcagcatcgatgatgtatttcacatgcagctctcagctttggacattgcgttggctccccttcactctgactcaccttgactctgcacagaaatgctcctgggagagaacgctgacacttctcttcctgactgcagattcccgtcctgtggccgcttccacatctgaatctttccaatagtgggattttcagcctcacccacccatgcctctttgaaaagctaagaatgcaacccctcttgttcaataattcagttaggtgtttctagcacatgaccaatacttaggtcttttccagcccctcccatgaactttccctaaaaaatgtaactttctcaagtaaaatgggaatctttctgtggtgctggtgggactgaaaactggtatgtgattgtcgaaaggcaatctggatgtgtatactaagaatcccagaggctgggcgtggtggctcacacctgtaatcccagcattttgagaggccgaggcaggtgcatcacctgaggtcaggagttcaagaccagcctggccaacatggtgaaaccccatctctactaaaatacaaacaaattagctgggcatggtggcaggtgcctgtaatcccagctactcaggaggctgaggcaggagaattgcttgaacctgggaggcagaggttgcagtgagctgagattgtaccattgtactccagcctagggaacagagcaagactccgtctgaaaaaaaaaaaaaaaaaaagaatcccagaatggttataccttttgactgagttgcttttcttctaggacttaaacctaaaggattcgtcagaaatttgtaggaatggcactaaaaaggagtgaactgttgacacacaccacagcgtggatgaatctcatgcactaagtaaaagaagtcagactgaaaaggctgcacactgtaggatccagtttgtataacattctggtaaaagcaaaactttgtttttattttatttttacttttgagatggagtctcgctctgtcacccaggctggaatgcagtggcatgatctcggctcactgcaatctccacctcctgggttcaagcgattcttctgcctcagcctcccaagtagctgggattacaggtgcacaccaccacgcccagctaatttttgtatttttagtagagacggggcttcaccatgttggccaggctggtcttgaactcctgacctcaggtggtccactcgccttggcctcccaaagtgctggggttacaggcgtgagccaccgtgtctggcctatcacaaacattttttaaataacaaattagaaaaacacaaccacaaggaaactgtgggatgtggtgatggtgtcagggacgtttgtgtccacactcgtcacatggtaacattacgtgcgtttttggtacaccaattatacctcaataatgtggttttgaaaataaatctaactcaaatggcttaagtgtggcagggagcaggaagcgcagaggtgggggccgccaggctcccaggcccagctcccggtgtttcccaatgcctggggctcagctgcggcctgggctttacgccccctcctggcgacagaagacatagcggctccccgacttcaggcttctcccacaacatccaggaagggaggaagagagaggagggggagaaggaatgggggcaaagggagaggggaagcgggagacagaccagagaaatgaaatgtggtgaaatgtaagcatttggaaaatcagagtatctgggaattctttgggcaactttcctgtaagtctgaaattacttcaaaattaaaaaaaaaattaagggttgggcgcagtggctcacacctgtaatcccagcattttgggaggccgaagctggaggatcacctgaggtcaggagttcaagaccagcctgaccaacatggtgaaaccctgtctctactaaaatataaaaattagccggccatgatggtgggtgcctgtaatcccagctactcgggagggtgagacgggaaaatcgtttgaacccgggaggtggaggttgcagtgagctgagatcacaccactgcactcccgcctgggcagctgagcaagactccgtctcaaaaaaaaaaaaaaaaattaagggccaggtgcggtggctcatgcctgtaatcctagtactttgggaggtctcgacaggaagatcacttgagtccaggagttctagaccagcctgggaaacatagcaagactcgatctctataaacaaacagaaaaacaaaaattaaccggttgtggtggcacatgccggcagtaccagttactcgggaggctgaggtgggaggattgcttgagcccaggaggtcgaggctgcagtgagttatgattgtgccactgcactccagactgggtggcagaacaggaccctgtctcaaaaaaaaaaaaaaaaagaataaatttttaaaataaataaaaacaaaaagtaaaaaaattgaaaggaaactccaaggggaaaaaataagtttaaaaagaacaaggaggccaggcacggtggctcatgcctgtaatcccagaactttgggaggccaaggtgggaggatcgcttgaggtcagtagttccagaccagtctggctaacatggtgaaaccgtgtctctactaaaaatacaaaaatcagctggatgtggcggcacacgcctgtagttccagctacttgggaggctgaggcaggagtatcgcttgaacctgggaggcagaggttgcagtgagactccatcttaaaaataaacaaataaataaaagagcaaggaagctttgtttttagtttcttttcagaagttccccagcaaatgtcttttctactctccctggctggaatggattgtacacaggaacctggtacatgtgggcgccaaggtacctacccacactgaaggaaagagagagggaaggatctgttcagatcccagtctccttctcacccctaggccaggcatagagtccacaccctcatggcatgtggggcgcctggaggagctgcaggcatttaactaaaagccagccagattcatctccagccagagccaggtggatgctgggtcagaaactgcagcgtcctctgaaggaaagggtgctcgtgtctgtagcttgcatttactaagagggacacagactcagttacagaaatgagaagaaagatggccgggtgaggtggctcacacctgtaataccagcattttgggaggccgaggagggcaaatcacctgaggtcaggaattcgagaccagtctgaacaacatggtgaaaccccatctctactaaaaatacaaaattagccaggcttggtggcacacacctgtagtcctagctactggggaggctgaggcaggagtattgcttgaacccaggaggtggaggctacagtgacaagagattgtgccactgcactccagcctgggtgacggagtgagactccatctcaataaaaaaaaaaaaaagaaagaaatgagaagaaagtgacattgtgacatttcttgcaccacatttgagttttgcgtgtgtgtgtgtgtgtgtgtgtgtgtgtgtgtgtgtaagagagatagagcaagctttggacctaccccgtttacttttcacaaactagctaatgggcagtgaggcaaggacttcccactgtttctctgaccctccattgggctccaggtaacccagcttcaagctctcagcgtcgcctcctcagtcctgtctcccgtgcagtgggcgtcactccctcctcctttctccttcccagcaaagccattcacaccttcttgtcagtttgtcttctataaaagcttccccctcctcctcctcccctgcccactcctcctcctcctcctcctcctcctcctcgttgttgtcatcctctggatgagaagtgagggacttggagaaacagcggagggggctcaggagcccaccagggtgtctgtaatcccccacgtcgtcttctcactccatccctctcctggggtctccctttccccttgggatgagaaaggatggggtaagggctgatggggatgtgtaaagacaggacagagatacaagtgccagccacaaaccgacagaatgctggaaggaccttggaggcaatgtgtcctccacggtggagaggaggagacagaacccagccaggaccagggcgtcccctctgtcccttagacagcaaagggcaacagcaagagtaaaacctcttccaaggttctttcctctggaaagcaggtgacgtcagggcaaagagagagcgtgctgcagagacagatagatcaacacacatgacaggagagagacgcagcaacgacacactccttattcgttcacccaacaagtattgagtgagctccgggcactgttttaggggctgctgtgaggtttctcatctttggagctattgactttcggggctgggtccttcccatcggggaggcctttcctgagcactgtgggaggctgagccgcgtccctggcttccacccacga[133 bp omitted]ccaacatagtaaaactccgtctgtctctactaaaaatacaaaaaattagccgggcgtggtggcgggcgcctgtcgtcccagctactcgggaggctgaggcaggagaatggcgtgaacccgggaggcacagcttgtagtgagccgagatcacagcactgcactccagcctgggcgacagtgcgagactccgtctcaaaacaaaaacaaaaaaaacgaacaaacaaaactgtctccagacttggtcacatgtcctggggtgaggctggggcagcatcggggcagagtcactcctggttgagagcttccggcctagggacgcagccatgaacaagacacagttgacacccctcatggggtctcctttagccagggtggtaggtggggggcggggagatagacagctcacaagtaaacaaataaacagggtctaccgtgcaagacagaagaaatgcaactcagtgagggagctgcggaggcttggagggattgatgggggcagaggggacagggctacggagacaccagtggcaggtggagacaaccaaggaagacacaggtcaaggcccagacgcagataagagggagggagggagccctcgaatagctgcaaagtctggaacaggacagctggaagataaaggggcacagaaggagggggaagggcagggtctaccaggggaaaccaaggcacagcagcatttcccgcgatgaagtgtgtgttttgacctcacagaccagcgtttgaaagcccctggagtggatgactgttcccccacctccatcctcttcactccctctcccttcttctaatcccctccctttcccccctcccttctattgtctcctcagaaggcataaaagctcagggggcgtgaaagagtccaggcgctggagcgaggagccagagagagctgcggagagctgccagctgcagcggggtgagagcctaggccaggagggcagaggggcggatcccagctgcaccggggtgagagcctaggccaggagggcacagggtcggctgccagctgcagcggggtgagagcctaggccaggagggcagaggggcggatgccagctgcagcggggtgagagcctaggccaggagggcacaggggcggatgccagctgcagcggggtgagagcctaggccaggagggcagaggggcggatcccagctgcaccggggtgagagcctaggccaggagggcagaggggcggatcccagctgcaccggggtgagagcctaggccaggagggcagaggggcggatcccagctgcaccggggtgagagcctaggccaggagggcagaggggcggatgccagctgcagcggggtgagagcctaggccaggagggcagaggggcggatcccagctgcacgggggtgagagcctaggccaggagggcagaggggcggatgccagctgcagcggggtgagagcctaggccaggagggcagaggggtggatgccagctgcaccggggtgagagcctaggccaggagggcagaggggtggatccaagctgcactggggtgagagcctaggccaggagggcagaggggtggagggagtgaggggctcctgggagagtgatggggggcttgaagggatggggataacaggagaaaccccagcattggtggcagggaaaaggtgaggggcaggtaaggggacggaaaggtttgaagatggagtggtggaggcagtggggcagaaggcatgggcgctgggggaccaggtcggcctgatccgatgatgggggaaggagaggcttaattgcttgcacacgtccaaactcctcaagatgtgtacattaaatgtgcgccatttttgtatctcgatgatgcctccataaagctaaaaaataaattcctctgtccttatcggaaatgcacctggcccccgcttcggaaaatgactggccgctctctccttgcagcgtgttccgcagctgtaggcacctgtcgtcctgccttcgatggctcctccctccgtccccctggtcctcctcctcgtcctcttgctgagcctggcagagactccagcatccgcacctgcccaccgggtaacgcctccctaagttcctcggaaacaacagtgtccccaaatccctgccctctgggaagagtttttaaaaatgcttctggcttgtgtcaagggtcctggggaagaagctcaaatcctgaaaatatgagaagaaatattgcgtgtctctactaaaaacacaaaaattagccgggcatggtggcacgtgcctgtagtcccagctactcaggaggctgaggcaggagaatcgcttgaacctggcaggcggaggttgcagcgagccgagattgtgccactgcactccagcctgggtgacagagcgagactccatctcaaaaaaaaaaaaaaaaaagaagaaatggggtttcaccatgttggctaggctggtcttgaactcctgacctcctggcttcaagtgatccacccgccttggcctcccaaagtactgggatcacaggtgtcagccacggcacccagtctgggacgacactttgaaaacctttgatcacacacctccacagcatgggctgtagaggctgggttgagtttgaaatccgggatctgcgactttctagctgtgtgacttcagtcacattgcctaacctctctggtctctgagtggatcttctttgtccaattccagcactgtgagagttaacagttaactcggatggcaggcagctctcattatttagccaagaggattaaataattaagagatgttggtccagggatacacagtttcagttagacaggggaaataaactagatctctggtacagcatggtggctgttgttcataacaatgtgttgtatacttgaaaattgctaagagagtagatggatgttaggtgttctcaccacaaaaaagctaagcacatgacgtaatgtagagggtaattaccttgatggagtcactccgcagtgtagccgtatttccacacgtgttgtgcaccacgcctgcatttaaaatgcagtttttttctaacaaaaaaaaaaaaaagaggccagtcccagtggctcactcctgtaatcccagtactttgagaggccaagattagagaattgcttgagctcaggagttcgagaccagcctgggcaacatagtgagaacctccatctcttaaaaaaaaaaaattaactaggtatggtcttgcgtgactgtagtccgagctacttgggaggctgaggcatgagaattgcttgaacccaggaggctgagtttgcaatgagctgagatggtgccagtgcactccagcctgggcgaaagagcaataacccatctcaaacaaaaacaaaaacaagaaaagaaaagaaaaagaaaagaaatgctaacaacaacaacaaaaaaaaaaaaaaaaaaaaagagacgccggcttggcattcagctgccctgagttgggatagcagctctcctccaggttctggcttggtctttggcaagctatttgtttctttgagcctcctttttttctatataactaagggataacggaatccatcctatagggatgttcgaggagttttgacaagagctaatggctgtggagggttttctcagcgcttggcgttgtgtgaaacccgtgatgtgaattagctaattctaccccacaatcctttgcagttggttctattttgctacttcccaccttacacagtggaacactctggcttaaatattcagtgcacatcctccttaagagtctggaatctaccggccgggcacggtggctcacgcctgcaatcccagcactttgggaggccgaggagggcggatcacctgaggtcaggagtttgagaccagcttggccaacatggcgaaaccccctgtctctattaaaaatacaaaaattagctgggccttgtggcaggtgcctgtaagcccagctgctcaggaggctgaggcaggagaatcgcttgaatccaggaggcggaggttgcggtgagccaagatggcaccactgcgcttcagcctgggtggcagagtgagacgcgagactccatctcaaaataaataaataaataaataaagagtctgggatccacctgggtttgagtcccagctgttcttcttagtgtgttgcaatttgttgcaatttgcagaatctttctgggcctcaagagcctctttctttctttttttttttttgagacggaatttcgctctgtggcccaggctagagtgcagtggcgcaatgtcagctcactgcaagctctgcctcccaggttcacgccattctcgtgcctcagcctcccgagtagctgggactacaggcacccgccaccacgcccggct[138 bp omitted]ctactagggttgttggaggaagagcctctctttttttttttttttttctttgagacagagtctcgctctgtcacccaggctggagtgcagggatgagatcatagctcactgtagcctcaaactcctgggctaaagtgatcctcccacctacaggtgtgcgccaccatgcctggctaatttttgtattttttgttttgttttgttttattgagacggagtctcactctgttgcccaggctggagcgcagtggtgcaatccccgctcactgcaatctccacctcccaggttcaagcggttctcctgcctcagcctcccaagtagctgggattatgcccagctaattttttttatttttagtagagacgaggttggccaggctggtcttgaactcctgacctcaggtgatccgcccacctcagcctcccaaagtgctgagattacaggcgagagccaccacgcccggcctaatttttgtattttttgtagaggcgagatttcgccatgttggccaggctggccttgaactcctgttctcaagccatccttctgcttcggcctccccaaatgctgggattacagcatgagcaccacccccaggcttaacatatctttaaagtgtgcaacaccgtattgctggctgtgggcacgatgttgtgccatagagctctaggacttcttcatcctgcataactgaaattatacctgttgaagaacaattccccatttctccttccccccagcccccaataaccacctttctcctctcacaacagaacgctttaagctttctttccaggccagttggctttgtctcaggaagtcctcaatttcctcatcggtgcaatggggattgaaatgaacctgctccacaggccagtgggaaagtcgtatgacgacccacatcaccccggacctgtgggacgcctgccccgctttctgtctgcttgagtcttgatttctgcatctctatccagggacgaggaggctggaccctcaatagtgctggctaccttctgggtcccggtgagtgaggctgcgctcagctctccatccctggcccgagtctgcctggttgctgcaggcagtgagtttgtggcttgtaaagaccctcacccacattcactgaggcccatggatttatttgcagatctgtctggagggttagtctaagcagagcgatgggtgtgtggactctggagccagagccttgggcccaaatcccagctctgccccttgcttggtttgcaaccttgatctctctctctctcgctctctcactctttctttctttctttctttctttcttttttttttttttttttttttgacagagtctcgctctgttgcccaggctggagtgcaatggtgaatggtgcgatctcagctcactgcaacctccgccgcccgagtagtttaagcgattctcctccctcagcctcctgagtagctgggattataggtgcccaacagcacgcccggctaatttttgcatttttagtagagatggggtttcaccatgttggccagtctggtctcgaactcctgacctcaggtgatccacttacttttggcctcccaaaatgctgggattacaggcatgagccaccacacctggctgcaaccttgatctccctatgcctcagtttcctcatctgtgacagtgggtgtaatgatggcccttacatccgagaatgttgtgaggattgagttattaatagaacaatagctggtgtgtagtgggtgctgtataatgattagctgctattctttgtctctctctctccttttttttttttttttttttttttttgagatggagtttcgccttgttatctaggctggagtgcagtggcgccaatcttggctcacagcaacctctgcttcccggattcaagcaattctcctgcctcatcctcccaagtagctgggattacacgcatgcaccacaatgccccaccggctaattttgtatttttagtggagacggggtttctccatgttggtcagactggtcttgaactcccaacctcaggtgatccgcccgcctcagcctcccaaactgctgggattataggcgtgagccactgctcctggcaacttttttctcttttcctccatttgtctctccccatttctccagttgcatcttccctgggcaataggtgtgcccatggccacgtgctgcatagtgagcattacatccataaaataccgagattcccgtggtgctcaaggttggtttcagtttgagcttcattcagggaaacccaggctgcagagacagtgtggcaggagcagaaagaacgtgagatgtggacccagacctaggtgggttcaagccccagtcctgccattagcagcagggtaatttcgagcaagtgaccgcttgcagctgcacgatttccccaccggtaggtagggacggtcaacacgcaccccgtccgacagacttggtggaggcgctgcgtccggtgagccatgctgttgaattgatggacgatgtgtttcttcagttctacttaaccgaccacctgctcttgctctctccctccctacccagtcctccaccttccccaaatgggtgaccaagacggaaagagggagacagcccttgagatcctagacctgtggaaggccatcggtgagtgagcggggagttagacgtcttctcctgcgtcctcccctgcgggctctctcctggctttggaaactggtagatgtgagctccagccctcaccctgccgcttactatttggggggccctgggcaagtgatgcgtttccttcaagcttctgggccgtcacctggagccccagcttgctttaatgttcttttgttaccaacgtgaaattccgaatcctgtttgaaccatgggccccgtgttttctctgcatcagacctcacagaatccctccactttgaaatgacataaatggaataatcccatgatttagttgtatgactcagtgagaaaatgcacgttaatttcctagaagtgtctggcatatggtagaaatggaatggtttggctgggcatggtggctcacgcctgtcatccatactcaagcctccgagtagctgggattacaggcacctgacaccacacccagcaaattttgcatttttagtagagatggggtttcaccatgttggccaggctggtcttgaattcctgacctcaggagatctgcccccatcagtctcccaaagtgctgggatgagccgtcgcgcccggccttatttattttttaaacttttattttaggtttgggggtacatgtgcaggtttgttatataggaaaacttgtgtcacgggcgtttgttgtacagactacttcatcacccaggtactaagccgagtacccagtggttattctctctgctcctctccctcctccccctgctccaccctcgggaaggacccagtgtctcttgctcccgtctttgtgtctgtgtgttctcatcgtttagctcccacttgtaactacgaacgtgtgtgtgaatgttgtatttttgtttctagacgggctcccctactcccaccctccacagccctccaagaggaatgtgatggagacgtttgccaaaccagagattggaggtaaagccaggaaacacagaagagagacaccgacaggagagggggaacaaggaagtggcaggcagagcttagagggtaaaggaagaaaggaaggaaactggaaccaaccagggacctcctcacctgtaaccacagccactaccccgaccactcagcctcgactgtgaatccccatcctggcctcgactgctcccttcacctcgattccttcactgcgaatcccacctcatgttccaactctcatttcccagcctgaatctagcacttttgcaattaggaccccacacccaaccttgatctcccccagtatcactccctcaagcttagcctcagctacaacattgacgtcaaacctctcactttgacctcatggttcaatttcatttatttatttattttttggggatgaagttttgctcttgtcgcccaggttggagtgcaatggtgcgatcttggctgactgcaacctccaccttccgtgttcaagcgattcttctgcctc[134 bp omitted]cggcctcccaaagtgttgggattacaggcgtgagccactgcgcctggcctcatggttcaattttaacatcaacctctctcctaaataagatctttatttccagcattcattctatttttttttttcttaaggagtccctctctattgcccaggctggcgtgaagtggtgtgatcttggctcactgcaacctctgcctcctgcattcaagcgattctcctgcctcagccttctgagtagctgggattacaggcgcccgccaccacatccggctaattttggtatttttagtagagacggggttttgccatgttagccaggctggtatccaactcctgatctcaggtgatctgcccgccttggcctcccaaagtgctaggattacaggcatgagccaccacgccagggaccgttgtattgttcactgcctagcacaatgcatgacgcatagtaggtacttggtaaatatttgttaaatgaatgaattaaactatccaaacacagccttcagctgccaccttcccacccaatcatgagctcagcagatgcccaaaccccagcttgtcccaccttcctttagttggatgttcgccccaaccccatctccttcttcaatccttttttttcttttctttttctttttttttttttttttgagacggagtctcgctctgtctcccaggctggagtgcagtggcgcgatctcggctcactgcaagctctgcctcctgggttctcgccattctcctgcctc[174 bp omitted]gcccagctccttcttcaatcctaactcaattcctggagacgccatgtccttatttcaacagcactaattcatttcaaaagcatgtactggacaatactgggtatgatacgctccctgaattcactaatttccatcctcacctcgattacattctgactcttgaaaacacccaccatcaccatgtgccttcttaaaatgtgggc[138 bp omitted]catggtgaaacccaatctctactaaacatacaaaaattagctgggtggggagtgatagtgagaaaaaccattcaaagtttacctctttctttcccacagatctgggcatgctcagcatgaaaattcccaaggaggaagatgtcctgaagtcatagatgtcttcaaatccctgttcctatccttcttctccagctcctcctgctccctctgaaaccttttctaggtaccctatgctgagactaagatcctgaagttaaatacccaggtctcatgaagacattgtaaagcatttgaattattctaaaaaatttctggagtttcttaggttttattgattcatccttgaaatcagtataatgtgctattaatggaaccaatagtaattcgaggactagttgggagattctggggtaatcagggaatattcctgcaacacatttaaaggaattgtgttcttttggaatcatcccaattataacacgagctattgcataatacaaataaccctcttaagtctgagagtctgtgtctttatttgaaaagattcttcaaattgcgtacttactcctccatattctttcaacccacatgagtctcctcgagaagtgaggagaggcagtttggagcagaatggagagaataaaatgtttcttgtcaaacactccattttttcccttttaattagtctgggaatttttttaggggtagcagaatccaggatgatggggtcaggtgtgggactgggaaatccaggatgacagaatcaggtgagggactggggaaaatataacctattggaggcaatccattttggattattgttttgctgaaagttttactttcattttgggtttgaggagtcacaggaaaaagaaaccacagtgttacactgaggcaggggaatcgcttgaacccgggaggcagaggttgcagcgagccgagattgtgccattgcactccagcctgggcaacaaagtgagactcaaagtaattaatgaccaaaatgagtgactgagacactgtcagtctccatccatcgaggtttatgaaatcggctgtggggcacgtccagggaaaggtgagccacagacacctctgtggctgtttttctgaagttttcaggatatttactatttatacatttccttagacgggggcaggcatagaggcagaggggtgggtaggtggtgagctgaatggttaaattcctatcagtctttagttagtgcccagtaaatctacatttaaaaaaaatatatgtttctattttttatttatttatttattttaattttttttttttttttgagacggagtctcgctctgtcgcccaggctggaatgcagtggcgtgatatcggctcactgcaagctccgcctctcgggttcacaccattctcctgtctcagcctcccgagtagctgggactacaggcacccgacaacatgcctggctaattttttgtatttttagtagagacggggtc[133 bp omitted]gagtcttaccctgtcacccaggctggagtacagtggcgcaatctcagctcactgcaacctctgcctcccgggttcaagcaattctcttgcctcagcctcctgagtagctgggattacaggcgccttccaccatggccggtgaatttttgtatttttagtagagacagggtttcaccactttggccaggctggtcttgaacttccgacctcaagtgatccgcccgccttgggctcccaaagtgcaacgttttacataagataaagtgcatgtttgaaggcaaaaaagggcgtaaagggagtaaaggaagcaccaattacttagacatctttgggtaggtggaggaatgactgagctcatcttatctttgttccacgcctcagaagataagctagtaatggacattgtcagtgtggaataaaacagacctgagttttaggagctagacttacattgtagacctgaagttacaaagggtgagttcttgtttatgggaagtcagcaaagaatttccttatgaatgatttgcgggggcattcgtggatgcccggggcctcttccctttccgtggggatctggctgatgccaaatgccagcaactgctgtccaattggaagagggcgctgcctgactcagccaccaggctgacctctccttttgcataaggagtttggggaatcctgaggtttttcttcgcataatgaataagtattaatattgttaatacttattcattaatattgtaattaattataattattacaataaattacaataaataattaataagtaattaatattaattaattactattcatggcatggtggctcacgcctgtaatcccagcagtttgggaggtcgaggcgggaggatcacttgaggtcaggagttcgagaccagcctggccaacatggtgaaaccccatctctactaaaaatacaaaatttgctgggtgtggtgtcaggtgcctgtaatcccagctactcggaggcttgagacgtgaaaattgcttgaacccaggaggcagaggctacagtgagctgagattgtgccactgcaccccatccagcctgggtgatagaacgagactcagactaaaaaaataataataataaaaataataattatacagagtcaaatgtcggggattcaaggaggcagaaagcagatgagttctcgccctgctggagactcacgtccctgggagaagcaatcacttaaagtgattaagttaatacgagaggctgcagtgagatttttttttagacagggtctcactctattgcctgggctggagtgcagttgggagatcttggctcactgcagccttgacctcctgggttcaagtgattctcccacctgagcctgctgagtagctgggactacagacatgcaccgccatacccagctaatttttgtgttttcagtaaagatggggttttgccatgttgcccaggctggtttctaactcctgggctcaagtgatccgcctgcctgggcctcccaaagtcccgggattataggtgtgagccaccacacccagctttgcagtgaggttttgaagcagtgttatgtgatgggattcttttttcttatcaaaaaataatttactgggcaagtacggtgattcacgcttgtaatcccagcactttgggaggccaaggtgggcagatcacttgaagtcgggagttcaagaccagcctggccaacatggtgaaaccccatctctatcaaaaa[132 bp omitted]gaaatcctatctctactgaaaatacaaaactcagcctgctacagtggcaggcgcctgtaatcccagctactcgagaggctgaggcaggagaatcgcttggacccgggaggcagaggttgctatgagccgagatctgacactgcactccggcctgggtgacaaagctagactctgtctcaaaaataaataaataaataaataaataaataaataaataaataaattattgccttctaatatttttttagcagcccaagtccaatgattgcattaaaaaaatttgttgcatctatgccatgaatacaatatttaggcagtcatgtcagcttttcttttatttttctctttaggatagggccttactgtcacccagtctggagtacagtgatgcaatcatggctcactgcagcctcaacctcctgggctcaagcaatcctcccacttcagcctccccagtagcttggattacaggtgtgccatcatacccggctaatttttatttttatttttgtagagatgggggtctcactgttacccaggctggtctcgaactcctggccttaagtgatcttcctgcctcagcctcccaatgtgttgggattacaagcattagccactaggcccagccttacttctaatttttattcttatttttaatacatctccttttgtttaaggatatataccaagtgcctagaatatcagctgataagtgttccataaatgtctgtggaatatttgttagacttattattattttttgttattttttaaagttatttattttatagagacaaggtctcactcgcttgagcccaggttggtcttgaactttttctttacttatttttggggtggagtctcactgtgttgcccaggctggacttaaactcctggactcaagcaaacctcctgcctcagcctccccagtagccgggattacacatgcgtgccactgtgcttagtttttttcttatgagatattggaaaatgatgagactttgctcattggaagagaaacagcaacagacactaaaataaatctgtaagaaagcaacagacataatcaaacagaaaacaaaactcatgggggaggataaatatttattcaaacatccgggcaattcctaccaagtgctttatgtgtatatgtcatctggtaacattggagaaaaaccatcattcactgtctcttggggtggaggatgtggacctgactctggaatcactgggaggtggtttcccggtgtgttttcaggtgacgcttgaatgtccccagctgacggaaggccttttgacaggtgggacatttgtagggcttctctccggagtgggtgcgctggtgaacgttcaggttccccttgtggctgaaaactttgctgcagtatttacatttaaacggcctctccccggtgtggatcctcttgtggccctgtaaggtggactcgtgggcgaaccgcttttggcagacgtcacacatgtagggcctctcgccagtgtggactcgctggtgaactcggaggtctgagggctgcaagaagcgcttccgacagagatcacattgaaagggtctgtctcctgtgtgtgacctcctgtggatgcttagctgggaaaaatacttaaatgatttattgcacacgtcacatgcaaagggcggcagggccttggcttcttggccatctgggtgactgaccgggcccgcagggcctggggaatgaactggattgatctcagcttgtcctggggattctctgttgcccacaggtgtggcttctccttgaggctcttcttgggaaatggaggaggcatctggtttgcttcttttgggactgctcagattcagagcatctcctctgttcccgctgtgagtcaaagcttctctctccacaacgcaggcagaaggtgtgtcagcatccacattttccacagaggctcttttctggggttccttcccctcctttgctctcaccagatctggtggaagaagggattccacacacaacagttaacaaagccgattttcaatacaccaaactcattgcaaccaaacactgaccttggctgagaacttcccctcaacctcaagcctaagacattggactgtaggtctctggaaagtggaggagagattttggcagctgatcgccagccccaggggatgataatgctgggcccccagccccgcaccccagaagagagggactaacccctgtggatccaagtcttcatactcactgggactctttggaagctgaggctctggggatgacagtcctgggttctcttccctgttttccttcagatccttctccaaggtctgcttgggtctcggagagtttgggtcacctgttacgtcaatactcttgtgtagcagaaagtcctctccctgaagaggaaaaaccaagagcaatgactgccgtgtctatactggtggaagtagggacatgtctgtcccctcctgactggacacaccagacttcccatggaccaccccatcaccccaagtaaacatcaccacctcatttctgcgtctgtccctaatctgcaccctccatattctaaatcagctcctttgcctggcggttttcactgtttggttctctgagaatatttctccccgccgtgccaatgtctccctgcccctgacgctggaagaagcatgactctaggtggaggcccctaacccctggcaccattggcattggggctgcatcatcctcctggagggggcgctcctgtgcagagcagagaccccgcctccaccctctagatgctatcaacaccccaccacccctgagaatgccaaacaaaaatgtcctcagacattgccaaatgtgtccttaaaggcaaaatcaccagttgagaaacactcctcaaattaagaaatcaacagtctgagaaagtgggttccttgctgaatgacttcatgaaatgtctttgcggaaactggatggggtagggaccttcagttcattcatctgtgccaactgcctccctcacttcactgagaccatttcttacccacccccccaccctaaatgctaaaagctctcatggtggagagaaaagtagatgaggcttccctctctgtgatggctcaggaatgaatgtttggggatgtatcatgtccatggggaatggctctaatcttgtcctgtgccaaatctctcaatcagttctgcagccacacgatttcctcctgttccttctcccacctctgcccagacaccaaggcctcacacactcacctgcctcctggacagtgcagcgaccctgggcaggatctgctgctctcggcgggcctggcctgtccccggatgcatctggttcacagaggaggcccactggctggacacgtctctcggatcatctctgacactggcgggggcttcagccatctcgacatctgagttcagcataagatattctttgccgagcaagttgactatagactgtagagagaaaaaagacaatcagacactatgagaacctgaaagtagctctcatatttcctgggtcctgccataatgctcacactttactgtaattaatgttcaaatctaccttcctgatgcagaatcagctctgtggacacagcaatctgtctgaatttttttcttcactagataagtacataaatatgagtcatttagatgaaagggtctctaaccaaagagaagacaaggagaaatattctgggtgaatccaactcaattggccaatggcagctcaccttgtgttagaacttaggggctcatttggggacctggaggcagatccctgcatctgataccaaccactttccctgcctcaggatgggacttctgggccccccttcagttcactctaatgcctccttccctacgttccatcaggcctaatattttaccaatgtctttctttcaggttggcctcacacagtgtgtgggttcctgtatcccctctgcctgtccatctcctaggtcaggtatttgcaatattagctgtgctgatatttgagactggagaattctttggcccccatcccagctccccttccctgcaccaatcacgaggttcccactcacccatttcttgggtcttctgttatttcgtagcaggtcctccaggtctttgcagctctgcacaccgttcaccttgactaagacctggagctcctggggcatggagatcatgaactgctccatcaccagcatgtccaggatctgctctttggtgtggaggtcgggcctcagccacagatggcacagctcagtgagtttcctcagagcctggatggggtccgactcctctgggcagctgaacatcctgaaattcatgtgccaagtctcagggttcctgtcgtgatttccaagttgagtttctggggacgccacagaccgtggagtgtctgacccagggctgttgcagggtcctccctgaccccatgagagtgtccaatttgcagccatatctactggagaatatttcaatcagcctctgagcaagctcttccagtagccagtatcaaattgagacctatttacacaggctgcccctgtttcttctcagtaatatattcacagtttgttcagaagtctgcaggaaaaaagcatgagcccgattattttaactttctactccacacacccctcccttccaaatccctcatcccaatcctggaccccacttgtccatgggcatcggactcagccctgtggaaatgaatccactctgttcttctctgactacatgttctggggtaaaatctgaatgctcccctggattctgatctctaggggatcattgtgcagaggtggaactggttttcctttcaactggaacaacactgctcttgactgtaaattaaatcggatatgtatgtgaagctcctagaatctgatgtaacaataatgtcagttctttatgttttcccgtcaagacaagatccaaggcaaagcccttagtcataattatgtaaaaagctagagaaaaatattaatagttacaacctacgattgtccccaacacatttttcctgttaaccccaggatatttatttgctgcagg[308 bp omitted]aaaaaaaaaaaaaaaaatcctatgagaattaagctcctgcacagatatgtggttgtttcggtaaaacacacatttatgaaattcatcacttttactaagaacatgcgctatgttgtgcaaccatcaccactttctaattccagaatcactgcatcaccccaaaagagaacgccatccccatcaggaattacctcctgccccaaccccctcccccagcccctggccatcactaatctgcttattgtctctgggagtttctctgttccttatctcattccataaaatggattaaagtcttatgaaatttccaggtagtgggatcataccatagagcggttttttcttttttctttttgagacagggtcttgctctgtcatccaggctggagggaaatttgcagtcatggttccctcggcctcaacctgggctccagtgatcctcccacctcagcttcccaagtagctgggactacaagtgcatcaccacgcccggctaatttttataggttatttttgtaatagagatggggtttcgccatgttgcccaggctggtctcaaactctgggctcaagcgatgcgcttgctttggcctcccaaaattcggggattacaggcgtgattgcattgcagctggcctacatttttaaaaaattttatttttttatttatgttttttgaggtggagtttcgcactgttgcccaggctggagtgcagtggtgcaatctcagctcactgcaacctctgctgcccaggttcatatggctctccttcttcagcctaagtagctgggattacaggcccccgcccagctaatttttatatttttagtacagacagggtttcaccatgttgaacaggctggtctcaaactcctgacctcgggtgacatgcctcggcctcccaaagtgctaggattataggcgtgagccatcgcgcacagcccaatttttttttctttttaaatttggttctaaacatagcttcaaaaggcaaaagccactgtatgatactctccaggcatcaattatcacccaagttcaacagctatgagaacacagccctgctttcctagacacaggtgggggaagcaacctgaaggtctgcagaggggagaaaaaactggcaggagggtctcaggaaaggtcactggaagcctggagggcgagtaccccacacttcctggaaggactctgagcaagtgcagaacagagagacagccagggagacaatcggcagaggcgggagacaacccagaggaggagacaatatttacacaccacacatctcacagggctcctgtgcaaaacataagcaactcaaactcctccagagcgagaaaacacataacccactagaagggcttaaggcgcctgtgtggacatctcagatgaagacatgtgaatggccagcaggtctaggaaaaggtgctcgtcatcactcatcatcagggacatgcaaatccaaaccacaaggcacccctcacgcctgctagagtggctgttcccaaaaagacacatggaacgagtgttggtgaggattcgggggaaaggggtcctctgcgccctgtgctgggatgtaaattagagcagccgatatgggagacagtatagaagctcctcagaaaattgaaagtccaacaactgcatgagccggcaatcccgctccggggcaggtacacagaggaaaggaaatcaggacgtggactccaaaacagtgaagctctgaagtgacagacggtgggaaggtggaaaaactacctactgggtactatcctcatatcctgggtgacaggttcagtgatacccaaaacctcagcatcactcagtacactcacgtaacaaatctgcacaggcacccaccgaacctaaaataaaagtggaatttttttttaaagttatctatttttgtttttaaacttgcagcagtgtcttgctctgtcacccaggctggaatgcagtggtgcatcctggcttgctgcagccttgacttcttgggtccaagtgatcctcctgcctctgcttcccaaaattctgggattacgtgtgagccactatacctggcctacttaaaattatttttatttttatttcgttttattgatttattttttgagacagaatctcactctatcccccaggctgcagtgcagtggccgatctgggctcactgccacctctgcctcccgggttcaagcgattctcctgcctcagcctcccgagtagctgggattataggcgtgagccacccctctcggctaaattttgtatttttagtagagatggggtctcgccatgtaggccaggctggtctcaaactcctgaactcaagtgatccctatgcctcggcctcccagagtgctgggattacaggtgtgagccaccgcacctggccattaaaacttttttttaaaaaaataaaagaaataaagttaaataggtctactgcacagcatggtgactatagttcacagcaatgtaccgtatacttggaaattgctaagggagtcgatttcaagtgttgtccaaaaatgataagacagtgaggtagagcctatggcagtttgctcgatttagccgttgcacaatgcgtacacaccttgacacactatgctgtgcaccggacatatacaccattatatatttatatttctcaatttgaaagtaaattaggcctggtgcgatggctcactcctgtcaccccagtgctctgggaggcggaggtggcaggatcacttcagcccagcagtgaaccgcgattgtgccactgtgctccagcctgggagacacatccagcggccatctcgttttgtttatttattaagtaaatcgatacattttttaaaagcatacagatatgagaaaaggcagcctgaaattctgggaattaaagaggttttcccgccaggttccctaagcgcccctgctcagaaagcggagatcgaggctgaggcgggcagattgcttgagccgaggagttcgagaccagactgggcaaagcagcgagaccacgtctctatagtaaataaaaaaatgcactcgggcggtgtggtggtgtgctcctgcagccccagctaggtggaggccgaggagggcacatagcttgagcctgggagttccaggccagcctgggaaatgagcgagaccccgtctctgaaaaataaaatgaaacaaaacctaaccatgatgagaaagttaacattattactttatttttctcctttttttttttttgagacggagttttgctttgttacccaggctggagtgcaatggcgcgacctcggctcactgcaacctctgcctcctgggttcaaatgactctcctgactcagtctcccgaatagcgggtattaccctaacctctgcctcctgggttcaaacgactctcctgactcagtctcctgaatagcgggtattacgggcgcccgccaccacgcccggctaatttttgtatttttgttagagtcggggtttcaccatgttggtcagactggtcttgaactcctgatcccgtgatctgcccacctcggcctccagagtagctgggattacaggcgtgcgccactgggcccgaccgagaaagttaatattattcctagtttacagaagcacttcatcgccagtcagagttaatcatggggtgcaaaggagacccgctgccttcacaaagtctccgagaaaataaatgcatgagaaaataaacccaaactttctgaaaccaaccccccgcatgccagctccgaaaccccacagccatcgccgctggacactcacctccttcccggcttctgcctccgaccttctcggtctgggatgcgctctccaaccggcctggagctgaactgcgtctatttatggagaagcgggactccaggccgcgtttccggttccctgcgccgcgccgtgattggtttagggccacagagtccattttcgtaatcggcgttgattacatttcccactgaaaccccacccacaggaaattaatgtattaaacgtgcctactgtgcaaataatacaggttttcccgctctactgagttgtcatattgctgaagtatgtggaggcctcagaaaatatagatctgcaagttttaaccactttgggtcccctcatgccacagacagtaatatcctaacaagtaaaggacgtgttaagagctggttgacttcgcttattaaaacaaaacggaaaaagaaaaaaaaaagaaaaattcaaaatagagttggttgattaatatcaaaccagtgatttaatctcatttttaatctcatttgagcgaagctttcacacgcgaattccaagatgttgaaaattgtggacactcgttgatatgtaatgaatgtttgtgataattttttacttttttatttttttcaaaatcttggaattggcatgtgaaagctttgttcaaactaaactaaatcactgatttgatatcagccttatataaaagcagtgggaaccagagaaaggcacatggtccccactctgcattcattccaggacggtgatagggtggtttatagatacactgagggtcctacggggttccctagttctcagccccctcagttagggctctcaagcaagaaaagccttaacggtgggtgtgaattttactgtgtggatcatggagttaatgtggaatgataattaagtgctaggcaggattagattacaatttgggaagttcacaccatcagttggatgacactaatccattcaagtagtgactcattcattttaatttcagaggaaaccttctcgtctaacctttaggacaaattggagggctgttaattttacactgattctggtttaaatccttggaaaatcttaagccgcttcactctgggaacttcaaacttcttgtgactagaaccttcctgatgtgttgttttgaagatgcaataagactgggtcaataaagtgctcgatacaaggtcattttgccaaacagttgtgacaattattttctggtgcattttctcatactttgtgatattttcccttcttaaccactgag[143 bp omitted]cccgtctctacgaaaaatacaaaaaagtagccaggcgtggtggcaggtgcctgtagtcccagctactcgggaggctgagacaggagaatggcatgaacccgggaggcgaaacttgcagtgagcggagatcacaccactgcactccagcctgggcgacagaccgagacagcgtctcaaaaaaaaaaaaaaggaattattcactggaattaactgggagctgcctaaaccaccatcttcctatctgcttcccccgaatcctcccctctggaaactcacagtctatttctgtgaagtatgttgttggtattttggtagggatcgcattgaatctgtagatgtctattaatagtatggtctttttcacaatgttgattcttccccctacgaacatgtcttcccattttctggggtccgctttaatatttttcattagtgtttaacagttttccttgtggaaatctttcacctccttagttaaatttacttccagggttttggggtgtcttttgctcttgtaaatgagattgctttcttgatttttttcttgccactagttcgttgttggtgtataaaaacactactgatttttgcatatcgacttagtatctggccaccttactgaattggtttatcaattctaagagttttactggtggaggtttcagggattcttatagatgacatcatgttgttggcaaagagagacaattcgacttcctccttctgaatttggatgccctttgttcgttgctctggttgagactttcccaacacattattattaacgaaggtcaccaggctgaagtttggaaacaggtatatattgtgatgcaatcgccaggaccaagctagttaacatctccctcaactcacatagataccacgttctttccttcttcttatttgtttaattctcaattattgggctcaagcaatcctgcttcagcctccctagcagctaagactacaggcacgagccacatctggctttcttttgatatcgttttttttttttctttttgagatggagtctcattccatcacccaggctgcagttgcagtggtgcgatcttggctcactgcaacctctggcaggaggattgcttgacccaggaattatggacataaatagataatgaaaagaaaatagtcactatgtgagttgacgaatacattaattagcttgattgtagtgataattacaccatgaatagggatatgtaaacaccagcatggtgaccttagtcaccaaggacggatagaggccaggaattggagagcagcctgggcaacatagcgatacccccatctttacaaaaaagtttgttaattagcccagtgtggtggtgcttgcctgtaactccagatactcaggaggctggagcaggaggctctcttgagcccaggggttcaaggctgcagtgagctatgagttttccattgcacccagccaaggtgacacagtgagaccttggctctaaaaataaatcaatcaataaacaaatttatccacacaggtaggagatctctacaagaaaaactataaaatactgatgagaggaaatgaagagggcacacaaatggaaagatagtccatcttcataaatcggaagaattcacattgtgaaaatgaccacactattaaatagagatctacagatccaactcaatccctaccaaaatgtcaaggacattcctcatgagaacatgacatgtttcaagaggagaggattggagggaattgggtaggtagatggtggttttaggcagattctagttcattccacttaataactccatctgaactctgactcactatcaatacctcaattcttaacaaggaaaaacatcacagagtatgagaaaatgcatcagaaaataagtgtcagaactttttggcaaaatgaccttgtatcgggcactttactgacataatctggttttttgtttgtttgctttttgagatggagttttgctcttgttgtccaggctggagtgcaatggcatgatctcagctcactgtaacctccgcctcccgggttcaagtgattctcctgcctgagcctcccgagtaactgggattacaggcatgcgccaccacgcctggctaattttgtatttttagtagagatggggtttctccatgttggtcaggctggtctcaaactcctgaccttgtgatccacccgcctcagcctcccaaagtgctgggattataggcgggagccaccacttccggccaacataatcttatttaatcttcaaaacaacatgtcaggaaggtaataattccctggttctagtcacagggagtttgaagtttccagaattcagtgggttaagatttcctaaggattgaaaccagaatcagtataaagtgcacttaattgtcattccacatggtctccatgatccacacagtaaaattcataccaccattaaggcttttcttgcttgagaggcctaactgagggggttgagaactagggagcactcagtatgtctataaaccacctcccatcatcctaaagtgaatgcagagtggggaccatgtgccttcctctggttcccactgtttttacctaagagtaggttggctgatatcaaagcagtgatttagcctagttcaagcacagctttcccatgtcaattcccagattttgaaaagtgaaaaattatcactactactcattatgtatcaacaatgactgtccctttttttttcaatatcttgacattcacatgtgaaagctttccttaaactagagcaaatcactggtttgatattattcaaccaactcttaacatgtcctttactcattaggatattactgtctgtgccatgaggggacgcaaagtggttaaaacttgcagatctatagtccctgaagcctccaaatacttcagaaatatgaaatgtaattcagtagagcgggaaaacctatgttatttgcatggtaggcatgtttaatacattaatttcctgtgggtggggtttcattgagaaatgtaatcaatgctaatcaccttcaatggattctatggccctaaaccaatcatgtgggggcccaggggactggaagagaggcctggagtcccgggggttctctataaatagacagttcagctccagagcagttggagagcacatcctagaagagaggaggctggaggcagaagtcaggaaggaggtaagtgtccactggggatgtctgtggggttttggagttggcctgcaggggttggtttcagaaagatttggattgaggggttggtttcagaaagatttgggttggggtgttggtttcagaaagatttgggtttattttttcatgcatttgcccggacaccttgtgaaggcagtgggtctgctttgcaccctattatttattctgacttgttatataactctcccttaaaataggaataatattaactttctcatcgtggttaggctacattttattttttagagatgagatctctctcattgcccagactagactggaattcccggactcaaacgatccgcctgcctctgcttcccaagtagcaggaactacaggcacttgccaccatgcctgaataaatgtttaattttttttgtacagatggggtctcagtacattgcccaggctggtcctgaactcctgggatcaagcatgctcccatcttggtcttccaaactgttggaattacaggtgtgagccaccttgctggccacacaccacttgttaaaaagcatcgctggattctccctttccacagggtaaaatcagccattgatgaatgggcatcaacctactaggccaatgagaatctgcactaagtgtccctacctgggggtcctgtgtgctgtatactcccagaattgaatactaacccgcgtacctgcctttattttttcccatgtcccattgcttgttttaatgggaaatgaactgacagcgaatacaaagtggtttctaggaacatgaacccctttttttagagacaggctctcactatgttgcccaggtggttgtcaaactcctgggctcgagggatcctccctcctcagcctcctgagcagcagcaggtgccctgtggcaaaatcatttttaattccagaatttcaggctgccttttctctctcatatccatatgctttttcaaaaaaaaaaatttacttttaaattgaaaaacaagaaagatacgtatttatggtgtacagcataatgtgctttgcaggatagaaacaatgtaaaatgggtaaattgagctgatattcacatgccttactttatggactaatcatttttggtcatgaggatgcttaaagtctactctttaagcaatttccaattatacaatacattgttatgaactgaagtcaccatgttggacaattgctctcttgaactgatctcttcaactgaaattcatacccttaaacctatatctccccaaccctcaccatagccctgttaaccaccattctactcactgctactatgagtctactgggaatttttttttttttttttttttttttggtgacagagttttgctcttgttgcccaggctggagtgcaatggcgcgatctctgttcaccacaacctctggctcccgggttgaagtgattctcctgcctcagcttcccaagtagctgggattacaggcatgtgccaccaagcctggctaattttgtatttttagtacagacggggtttctccatgttggtcaggctggtcttgaactcccgacctcaggtgatccgcccatctcagccgtccaacgtgctgggattacaggcgtgagccaccacactcagcctgagtccactaggtttttaattattgtttacattacctacttcttttattttaaaaactattttataatttcaagttttattttaaatttggggtgtacctgtgcagatgtgttacatgagtatattgagtgatgctgaggtttgaggtatgactctacccatcacccaggatgtgaggatagcaaccaataggtagtttttcaaccctccctccctctatccctccagagtttcactgttttggagtccacgtcctgatttcctttcctctgtgtacctgccccagagcgggattgccggctcatgcagttgttggactttcaattttctgaggagcttctatactgtctcccatatcggctgctctaatttacatcccagcacagggcgcagaggacccctttcccccgaatcctcaccaacactcgttccatgtgtctttttgggaacagccactctagcaggcgtgaggggtgccttgtggtttggatttgcatgtccctgatgatgagtgatgacgagcaccttttcctagacctgctggccattcacatgtcttcatctgagatgtccacacgggcgccttaagcccctctagtgggttgttttctcgctctggaggagtttgagttgcttatgttttgcacaggagccccgtgagatgtgtggtgtgtaaatattgtctcctcctctgggttgtctcccgcctctgccgattgtctccctggctgtctctctgttctgcacttgctcaaagtccttccaggaagtgtggggcactcgccctccaggctaccagtgacttttcccaagaccctcctgccagttttttctcccctctgcagaccttcaggttgcttcccccacctgtgtctaggaaagcagggctgtgttctcatagctgttgaacttgggtgataattgatgcctggagagtattactcagtggctcttgcctaatgaagctaggtttaggaattaatttttaaaaatcttattattgtatcaacccacttctttaaaatatcaaagagcactagactttaaatccattttctgagatgagattaggaatagagaaacccttagagacagaaggtagattagtgattgccaggggctggggtgggtgggcaggcggtgatcactgatgaggatggggttccttttagggtgatgagataattctggagctagaaactagacagtggtaatggttgcacaacatggtgcatgtcttagtcccatgaaattgttcacctgaagagggtaaaaatgatgaaattatgaatgtgcatttcaccaaaataacaaaatatctgtgtaggagcttaatcctcataggattctttagtgctgtcccttctctggagcgaataattctgggattaagagggtttgttgtgggacaatatcttacgttgtaactatttttatttgtcttattgcataattatgactaaggatttgccttggatcttatcttgataagaaaacataaagaattgacatgattgttatatcagattttaggcgcttcacattcctgtcctattttatttacagtcaaaaacaatgttgttcgatgggcaggaaaaccaattcagcctttgcacaatgatcccctagagatcagaatccaggggagtattcagattttactccagaacatgtggtcaggtgtagacactggaagaataacagagtggattgatttccacggtgctgagtccaatgctagaggggaagtggggtctgggattgggatgagggatttggaaggatggggtgggtagagtagaaactttaacagagctcatgctttttttccctgcagacttctgaatgaacagtgaatctattactgagaaaaaccaggggtggcctgtgtatataggtcgcaattagacaccggcttctggaagagctttcccagagacagattgaaatattccccagtagacatggctgcaaattgcacatcctcatggagtctaggagaatcctgcaacagccctgggtcagagccaccacagtccatgccatccccagcaactcaacttggaaatcatgacagtgatcctgagacttgtcacgtgaacttcaggatgttcagctgcccgaaggagtcggaccccatccaggctctgaggaaactcactgagctgtgccatctgtggctgaggcccgacctccacaccaaagagcagatcctggacatgctggtgatggagcagttcatgatctccatgccccaggagctccaggtcttagtcatgatgaacggtgtgcagagctgcaaagacctggaggacctgctacgaaataacagaagacccaagaaatgggtgagtgggaccctcgtgattggtgcagggaaggggagctgggatgggggctgcatggtgcagctggactcgagaggacccgaggggctgctctaggtcagggcttccaagtagaggagagtttgcccatcagggacacatggcagtgtctggggacagtttttattgtcacaagggggaggacaggagacgctgctaagcattctccaaagctcaggacaacccatcatgacaaataatcttccagattccaatatcagctgtgctgagacggcaagttcctggtgtaggagatggacaggcagagggggtacagggacccacacactgtgtgaggccaacatgaaagaaagacattggtgaaatattaggcctgatggaatgtagggaaggaggcattagagtgaactgaaggggggcccagaaataccatcctgaggcagggaaagtggctggtatcagagattcagggatctgcctccaggtccgcacatgagcccgccatcagccaattgagttggattcacccagaatatttctccctcttttctctttggtttagagaccctttcatctaaaggactcatatttatatacttatctagaaaagaaaaaagttcacacagagctgattctgcatcgggaaggcagatttgaacattaattacagtaaagtgtgagcattatggcaggacccagggaatatgagagctactttcaggttctcatagttagtctgattgctttttttctctctatagtctgtagtcagttttcttggcaaggaatatcttatgcaggaatcagatgtggagatggctgaagcccccgccagtgtcagagatgatccgagacacgtgtccagccagcggacctcctctgtgaaccagatgtgtccggaggaaggccaggccagccaagagctgcagaccctgcccagggtccctgcactgttcaggaggcaggtgggtgtgtgaggccttggtgtctgggcagaggtgggagaaggaacgggaggaaatcgtgtggccactggactgattgagagatttggcacaggacaagattacagccattccccatggacatggtacatccccaaacattcattcctgagccatcacagagagggaagcttcatctacttttctctccaccatgagagcttttagcatgtagggtggggggtaagaaatggtctcggtgaaataacggaggcagttggcacagatgaatgaactgaaggtcccatccccatccagtttcctcaaagacatttaatgtaataattcagcagggaactcacctcctacagattgtcaatttcttaatttgaggagtgtttctcaactggggtgattctgcctttccggacacatggccatgtctagagacatttttgttgtcattgtagggggtggtggggtgttgatagcatctagagggtggaggcggggtctctgctctgcacaggagcgccccctccaggagggtgatgcagccccaatgccagtggtgccaggggttaggggcctccacctagagtcatgctccttccagcgtcaggggcaaggagatgctggcacagcggggagaaatatgcccagagaaccaaacagtgaaaaccaccacacctgtgtcattagaagagttggtgcatccagtcaggaaaaagcagacatgtccttccaccggtttaggcatggcagtcattgctgttggttttccattctcaggaagaggacttcctgctgccagagactactgtcatgaaaggtgacccaaaggctctgagacccaagccgaccttggagaaggacctggaggaagacagggaggagaacccaggacttacatccccagagcctcagcttccaaacagtcccagtaagtatgaagacttacacctgtgtggagatagcccctctcttctggggtgtggggctggggtcccagcattatcatgtctgggggagttggcactcagctgccaaagcctctccatcccttactctccagagacctacagtccaatgtcttaggtttaaggttgaggggaagttgtcagccaacatcagtgtttggttgcaatgagtttggtgtattgaaaatgcaccttattaactgtgtgtgtggaatcccttcttccagcaggggtggtgggagcaaaggaggggaaggaaccccaaaaaagagcctctgtggaaaatgtggatgctgacacaccttctgcctgcgttgtggagagagaagcttcgactcacagcgggagcagaggagacgctctgaatctgagaggtctcaaaagaagcaaaccagacgccacctccatttcccaagaagagcctcaaggagaagccacacctgtgggcaacagagaatccccgggacaagctgagatcaatccagttcattccccaggccctgcgggcccagtcagtcaccccagtggccaagaagtcaaggaactgctgccctttgcatgtgaggtgtgcggcaagaggtttaagtatcgcggcaagttagccgtccacacgagatcacacacaggcgagagactctttcagtgtaatctctgcgggaagcgcttcatgcagcgcataggcctgcaatttcaccagcgaacccacactggcgagaggccctacacgtgtgacatctgccagaagcagttcacccagaagtcctacttgaagtgtcacaagagaagccacacaggggagaagcccttcgaatgtaaagactgcaagaaagttttcacctacaaggcaaatctgaaggagcaccagcgcatccactctggagagaaaccccacaaatgttccaagtgtccaagagccttcggtcggccggcgaccttaagacgccaccagaaaacacatcgagaagccacttcacagtgacttcaccatcgggtctgtcttctgcaccaagaaagtgtgaatgaagatttttcaccgatgttgtcagatgacgtttgacagatgaagggcgcctggcacgcagaggagtgccctagataggaattcctaggatgtttgtttaaatctttttcctccccgggggaattttggtttttgtttcattatttctattgttttaggtttattttggtttgtgttgctgttctttcaataaacatcttattagttttcaatattttgtaacaaaaaacagtctcctgattgacatgctgttgttatgcactgttttgctataaagtacaattgtccaaggagggtgtccggattaaatacacgatatgcctcgggaaatctgggtttcagataaacgttttttgtttttttagtatcagcttgttctaaattattcattatttatctgaaactcagcttttattaggtatcctaaatagttttcttttttatttttttttctattcttttttttgagatggggtctccctctgtcaaccaggctggattgcagtagcaggatcatcgcccactgcagcctcgaccttccaggctcaggcagtccttccgtctaagcctcccaagtagctgggactacaggatcataccaccacttcggccaatttttgtgtttttttgtggagatgaagatttgccttgttgcccaggctggtcttgaactcagaagtacaagtggtccaactgcctcagcctccttaagtgctggcattacaggcatgagccgctgtgccctgtattgtttttattagactttattataattatgatattcaaatttttggaaataattttttgtagtgatgggattttttgttgcccaggctggtgtggggtgagccaccacgcctggctaacgactttctttttcagagctgtcttaggttcacagggaaattcagtggacagcgcagagtccccgtagactcccaccccacacagcacagcccctccccgcccagcatccccagcagagcggtgcacctgttccatcagtgagcctgcctggacatatcaccaccacccagagtccatggtgttcattagggctcgctctgggtgttgtacatcctgtgggtttggacaaaggcctcatgagtacccaccactggagtattgtggggggggtattttcactgccccccccgaatcctctctgctctgcctatttatctccccgccccagatggtgtattttgtggcctaaatttggcaacctctaaattcctgatttgactcttgaactacggaggcattgggagtctctggtgactagttggtcttagtgatagtaccatcccctgaagcctttgttgatccagagatgggtggaccccaaactcagagcttctgatttagtaggccgggggtggggcctgagagtgtgcattaaaacagaattcgtaggccgggtgcggtggctctcgcctgtaatcccagcactttgggaggctgaggtgggcagatcacttgaagtcaggagttcaaaaccagcctggccaacatggcaaaaccccatctctactaaaatacaaaaattagccaggcgcagtggcacgtgcctgtagtcccagctacttgggaggctgaggcaggagaattgcttcagcccgggaggcagaagttgcagtgagccaagtttgtgccactgcactccagcctgggcaacagagccagactcagtctcaaaattaaaaaaaaaaaaagaatttgttttagaatagctttctaaagtccattgagctccctactgtccccacaccatttcctctattattttttgtttgtttgtttgtttgtttgttttgagatggagtctcactcagtcacccaggctggattgcagaggcacgatcttggctcactgcaacttccacctcctgtgttcaagcgattctcctacctcagcctcccatgtactgggactacaggcatgtgccaccacacccagctaatttttgtatttttttagtagagatgcggtttcaccacgttacccaagctggtctcgaattcctgacctcaagtcatccgcccatctgggcctcccaaagagctgggattacaggtgtgagccactgcgcctggcctcccctattgttaacatggtacgttagtatggcacatttgccacaagcgatgaactgactggatatattgccgtgatctaaggcccataccttattgaggcctccttagtgtttacacaatgacctcctcttccttcctccccatccaggatgccacattgccttgagttgtcacgtctccctaggatcctcttggtgacaatttcttagattttacttgtttgggatcacctgagaatgtgcattttaggtggtgctgatgctgctggtcttgggagaacattttatggatgagctgacaggcagagtcctgcagtctgcagaggtctggaaaggtcccttcccgaataggctggattcatttattaaaggccacttttgtaagactttggttcttgtcatcttaatttaaaggaaatttatcaagagacacacagcaaagagatgcatcatagagtaactattgcaaaggaaatagagtattttgaaagttaagggcagaatagacaggacatcctgggagcaaggattcagggccaactgctcctaaggatgagacagcaaagacccgctagagggagactcccctttatgggagtctcggatcattacacaagggggtgggaagaggtgttactagtaagcatgttctgggtggtcccctgggcacacaggtgcagtagctgtgcacacgtctctttagcatcttaagtctccacccaggggtgtgttttttactattataacgagcaaagggtcagtttgtgaacaggtaaaatcacaatgctcatgttctctacagggaaaactcccttttgtagatggttttgtgtgaatgaactcaattagaaagtgaaggctggggctgattgtgttggctgtacggtccccatgggtgctgcgtttggaggacatggtcaccttcttgactacctatcctgactcacccaggtccatttaggagaaagagtccttgaggtagaaacctgaatccgccatcaaatgtacacagactcccgtttaattcaagaagtggatgtttggtgggtagtggttctccatttagatattgggtccaacatccttctccagacacagaaaatgtgttgatgataccacctgcccacttaatttaaatcatgtttctctatgatccattaaccacatccgacatttctttagagcttcatttcccaattttcctacatgttggactcacttgaggtgttttttcaatatttttttaaaaagcaatgcctggggtccagccccaaggtaatgatgtgattggttgaggatgtggcccctgtgttgagagtttataaaactcctcaggtgatcaaatgtgtggctgagtctggcaggtcggttttctgattgtctggtcactccaattcctgttctctcatggggatcagtgagttcatttccacggagagtcatgcacctccattcccagtctaaagaaggtagactccacagctggctcccacccaccctgcacgggggtccctcccactgtggctggctacatgcaccactccagggactgcccctcatggctctgggcacatgtggcactgggtggcctttgcactgctgctccttatccacctatgtgctctgagccaagagcttgatttacctgatgtgacaatgaaaacaggatacccactgcaacctcaaaaaagcccagtgcggctgggcgcagtggctcatgcctgtaatcctagtattttgggaggccgaggtgggtggatcacctgaggtcaggagtttgagaccagactggccaacatggtgaaaccccatttctactaaaaataaaaattagctgagcatggtggtgcacgcctgtaatcccagcattgcattccagcctcggtgacagggcaagactcagtctcaaaaaaagcgccatgctagggatgactgaattgaatttagaaggtgcccttgctttcagaaaaacaacaacccaacactgcttaatctacccaacccggagccaaatctgcaccaaccaaccacctggcccacctggtggcttttcagactctgaccttgacgatgggacatgaggtggggaaggaggtggaagcacagctagggaagaaggggcaagagacccactcccctggcatgatccctggggtcttggaggctgggccggtcaacatggctgcagttatttctagctttctggattcccagaaaaaaacagctgtacttcaaagaaaatgcagaacaaggtgaggtcgacgtggaaaatcatcccaacatcagccaaacggaactgggctctgctatccgagtgcactcaggccaaacacccacgtgaagcttttacagtgagagaaaggaagacatttatttgcagggcaccaagcaaggagaatcgggcagctaatgtttaagacctgaactccccccatggcttaggagtaagggtttttttttttgtttttttgtttttttttgttttgtttttgagacggagtctcgctctgttgcccaggctggactgcagtggcacgatctccgctcactgcaagctccgccccccgggttcatgccattgtcctgcctcagcctcctgagtagctgggactacaggcgccatttttatgtataaatttataaagttaatattgataatgacagacagaaaataatgccttctctaagaatgtgtgaccaaccaccatccttccctcatggggatgtggagtttcccttgtcttggatgcctaacagagctgtcaatcaccacacatcctagaccgaccacatctttccccacctcacgtaagggtggctccagcccccttgatgtgcaatccacaagatttgtggggttatccttgattcctgcatttccctcacatgacacactcagtctctcaacaaatcctataccttaattaatgtgtttactgacatgaatttcacgcgacataaaattaactgttttatctgtacagtttagtggcatttggtgcatttacactgctgtgcggcagctcctctagctggttcctgtgcctgcatgtccagagtccaagttctgacatttgtacatactcatgaagtcattgccgtcatcaagaagctgaacatccccaccatcctccaacgcttccccaggctcttcatcatctgtccctcccacaactccatccctggacaaccactggtgttctctgtgtcattacagatcactgacagaatttccttatttttgccttttttttcttttttctttctttttctttttttttttttttgagacagtgtcttgctctgttgcccaggctggagtgcagtggcacaatcatagcgcactgtagcctcagcttctcaggcttaactgatcctcccacatcaccctcccaagtcgctgggaccacaggcacacatcaccatgctcggctaattgtttctatttttttgtagagctggggtctcactatgttgcccaggctgatcctgaactcctgggctcaagcgatctgcctgcctgggcctcccaaaaagtgctgggattacatgcatgagccagtgtgcccagcctaggggtagaattttctagcgatggaatcataccttatgtactccttttctatctgccctccttcaccttcataattattttgaaattcactcatgttcttgggtgtaatcaatgattcctttttactgctgagtagtattctcaacttcattgaattgtaccctttgcatatgtgtgatttattgtatatcaactatacctcagtaaaactatacgaaaaagataaggggttctctgttttttgttttgttttgtttttgagatggattctcactctgtcgccaggctggagtgcagcagcatgatctcggctcactgcaacctctgcctcccgggttcaagcaattctcctgcctc[135 bp omitted]ccgcccaaagcgctgggattacaggcgtgagccaccatgcctggccaggattttcttaaaacttaaaaacaaattcagcatttgaccagttctccccatttcaactttcagtattcatggtcaagccaacagccatcaacctggatgactctgttgccatcctcactgagctcctggttccttcccttcccctatatgggctgttatcttttttctcttttttcttattttgttctttttttttttttttttttgagacagggtcttgctctgtcacccaggcttgagtgcagtgacacaatcataatgccctgcagcctcaacctctcaggctcaaacaatcctcccacctcagcctccccagtacctgagactacaggtgtgcacaaccaggccttacaatttttttttttttgtatattttgtagagatggggtttcatcatgttgcccaggctggtctttaactcctgaacccaagctatccacctgcctcagcttctcacagtgctgagattacaggcatgagccaccgcggttggctgtatgggctattttcaaggcatcttctgagaaaacgctaaagagaagtcagaaagctactctatgaaggcagaggcattcgttggagctctgagtgatgtacctgcaatgtctagattctagttttaggagtcggcagagtcagcccaattctatgtgtcagaccaattcaatgactgaaatagtggcagctccacctactagtacaatgggtcaagttttcacatttcacttgttcctacaggatggggcctggcaggcttgagttgagatttatgcttgtttctatgtagctttggatcgttgtgaaagccaggtcatttcaatcattttgtgcaaacatcattgtgtgtaaaaacggtgtccacgttttgtctttgaaatggtccccgccctccgctcgttatcgtgttgagaatgaaatgagaggacatgcttggcacctggagatgattggatattacagctgtgcgccataagggcaaatggttccattgtttgatgagccgtcctggcggtgggtgggtcggtcacttctaaacagataaggaatggctagaaagctcttgtaccaaaccagcttgaagcaacctcacccacaccgaatccctccacgtttcttttcttttttctttcttcctttttttttttttttttttttttttttttgagatagagtctcgctctgtcgcccgggctggagggccgtggtgcgacctcgggtcactgcaagctccgccccccgggttcaagcaattctcctgcctcagcctccggagtagccgggattacaggcacccgccaccatgcccggctaatttgtgtattttagtagagacagggagggtttcactgtattgtccaggctggtcttgaactcctgagctcaggcaatgcgcccgcctcggcctcccaaagtgataggattacgggcgtgagccaccgtgcccagcaaatccgtctacttttcttttttctttctttctttcttttctttcttttctcccaacccccctccccccgtcaaacaaccaacagttttttaacacagaaagtaaggcataatccagggcttggactgtctttcaagaaaaccccaaacccgctgccaggaagtcacagccactaagtcccatcccaggcccagttgctgccaggaaacacaccgcgtggagacccagcatgactgctgactgattgcaagtccccaggagggctttatttttgcttttcaacatcctgttctgcaggttccttggctctttttgcccgtatgccgaagagccgggcattgggacgggccatgcggagactagcgaaggctttgaaattcttctcctcgatgatgactccagctttctccttctaggcattccggttgggcatgaccggtcctgtcagccgagcggccagtttcagttcttcagcagaactgtctcccttctcggaggccgagggcttcccggggaagcggatgcgtttggagcggggctccttcagccgccgcacgttggcctgcagggactgcgcctcctcggatccgcagaaatgccggcgtccgggcccccttcttcgcgtgccggccaccctgagctcctccaggcggaggccgcggccgtgcgcaccttcgtgtggtaccgaaccgtggggcagcgcacgatgggccggatgggccccgacgcggggcaggggcgaggcggcgcgccttggcttgcccggcctggcgcctgcggatcttctgggccggctggttgaaccgcttggccacgcgccgctgcagtccttggggaagcggggcttcgagatcgtgccgttccggctgggcgccgtggctgcctacggccctgcggctgcagaccagaggggagccaccgaggggaaggtccctgcgcgcgcgcaccccatccccggcctccgcctctaacctcccagcctgggccggaggccgcccctagagcccgggccccggtccaatgctgtctgcgaagaaggggcccatccatgcccgcgttggcggcagcgccaggccgatggcgctggatggagcccgaaggccgagaccccaaatccctctgcttttctaagaaatcgccctccagtctttttttttttttcagatctgtaacttgttttcacccctgatttaaaacaataccactgttctcccccaaattttcctttgatacagtaggtgaacaaaatagatttttttccccacaaatatcagcagacacttcttggcaccccacactgtattggcatgggtgttaacagtcccagttcaggtgtgcagcctttcaggtggatgcactgtaacaaggatgtaaatgcggagccatcctaagaatcacattcagtcatggggttgcccttccaagctggcagaaaaggaacccgggccaggcacc[184 bp omitted]gaggcaggagaatggcatgaacccgggaggcggagcttgcagtgagccgagatcgcgccactgcactccagcctgggcaacagagcaagactctgtctcaaaaaaaaagaaaaaaaaaaaaaagaaaatcgacctgccagactcagccacacgttagatcacctgcggagttttataaactctcaacacaggggccacatcctcagccaatcacatcattaccttagggctggaccccaggcattgcttttaaaaaaaatattaaaaactcctcaagtgactccaacatgtagccaaattagaaaatgaagctctaaagaaacattggatgtcattaatggatcatagagcaccatgattgaaattaaacgggcaggtggtattatcaacacattttctacgtctgtgaagaaggttggacccaatcaccaaaagggagaaccaccacccacccctacctccacttcttgaatgaaaggggagtctatgtacattttatggtggattccaggtccctgcctcaaagaatgctactccgaaacggacctgggtgaggcaggataggcagtcaaggaaatgaccacgtcctcaggatgctgcacgcgtggtgactgtacagtcaacacagtaagcctcagcgttcacattggaattgagttcattcaagcaaggccatctccagtagggtatttccactgtagtatttccactgtagagagaatgtgcacgttgatcttacccatccacaaaccgacacatttcttgttatgatagtaaaaaacacacacctgggcgggcagttaagacgctaatgagacatgtgcacagctactgcacctgtgtgcccagaagagcacccagaatatgcttagtagtaacacctcttcccacccccctaggtgtaatcatccaagactcccataaaggggagtctccctcaagcaggtctttgctgtctcatccttgggagcagctggccctgaatccttgctcccaggatgtcctgtctattctgcccttaactttcaagatattgtatttcctctgtaatcaattattctatgatgcatctctctgctgtgggtctcttgattaaattcctttaaattaagatgacaagaaccaaagtcttacaaaagtagtctttaataaatgaatccagcctatttgggaagggacctttccagacctctgcagattgcaggactctgcccgtcagctcaatcagccatccataaaatgtcctcccaagaccagcagcatgagcaccacctaaaatgtacattctcaggtaatcccaaacaagtaaaatctgagaaattgtcaccaagaggatcctagggagacgtgacaactcaaggcaatgtggtgtcttggatggggaggaaggaagaggagggcattgtgtaaacactaaggaggcctcaataaggtatgggccttagatcacggcaatatatccagtcagttcatcgctccagtcagttcaaaggtgccatcctaatgaaccatgttggcaatgggggaagccatgtggggcattagggagctccatggactttagaaagctattctaaaatgaattatatattttaatgcacactctcaggccccatgcccggtctgctcaatcagaagctgagtctggggcccacccacctgaggattaaccacgccttcaggggatggtagtatcactaagaccaactagtcaccagagactcccaatgcctctgtagttcaagagtcaaatcgggaatttagaggttgccaaatttaggccacaaaatacaccatctggggcagggagataaatatgcagagcagagaggattccgggggcagtgaaaataccccccaggatactccagtggtgtgtactcatgaggcctttgtccaaacccacagcacgtacaacacccagagcgagccctaatgaacactatggactctgggtggtggtgatatgtccaggcagcctcactgatggaacaggtgcaccactctgctggggatgctgggcagggagaggctgtgttgtgtgaggagggagtctaggggaactctgtgctgtccactgaatttccctgtgaacctaaacagctctgaaaaagaaagtctagagccaggcgtggtggctcaccccacaccagcctgggcaacaagaaatcccatcactacaaaaaattatttcaaaaatttgaatatcataattataataaagtctaataaaaacaatacagggcacagcggctcatgcctgtaatgccagcacttaaggaggccgaggcagttggatcacttgtacttcggagttcaagaccagcctgggcaacatatcaaaattccatctctacaaaaaccacaaaaattagccaagttggtggcgtgctcctgtagtctcggctgctcgggaggcttagatgggaggattgcttgagcctggaaggtcgcggctgcagtgagcggtgattatgccactgaacctcagcctgcgtgacagagggagacgccatctcaaaaaaaaaaaaaaagaaagaaagaaaaaagaaaacgaaaactctacaggatacccaataaaagctgagtttcagataaataaataatttagaacatgctgatactaaagaaaattgtttatctgaaactcaaatttcatcaggcattatgtattttatatggccaccctccttggacaactgtactttacagcaaaacagtgggtaaccccatgtcaatcaggaaactcagttttccgttatacaatattgaaaactaataagatgatcgtttattggaagaacagcaacacaaaccaaaataaacctataagaaaacaatggacataatgaaacagaaaacaaagctcagtggggaggacacatatttactcaaacatcctggcaattcatatctagggcactccctctgtgtgtcagacgcccttgcatgtgtcaaatgtcatctgataacattgatgaaaaatatcattcacttcttcttggtgcagaaggcatagaccggattatgcaatcactgagaagtagcttctggatgtgttttctggtggcgtcttaacaatttcagccgactgaaggctcttggacacttggaacatttgtagggtttctctccggagtggatgcgctggtgctccttcaggctccccctgtaggtgaaaactttcttgcagtctttacattcgaagggcttctcccctgtgtggcttctcttgtgacacttcaagtaggacttctgggtgaactgcttctggcagacgtcacacgtgtagggcctctcgccagtgtgggttcgctggtgaaattggaggctaataagctgcatgaagcgcttcccacagagattacattgaaagagtctctcgcctgtgtgtgatctcttgtggatgactagcttggaattacacgtaaacctcttctcgcacacgtcacatgcaaagggcggcagtgccttggcttcttggccatccgggtgactgactgggctcgcagggcctggggaatgaattgaattcatcccagcttgtcccggggattctctgttgcccacaggtgtggcttctccttgaggctcttcttgggaaatggaggaggcatctggtttgcttcttttgggactgctcagattcagagcgtctcctctgttcccgctgtgagtcgaagcttctctctccacaacgcaggcagaaggtgtgtcagcatccacattttccacagaggctatttttggggggtccttcccctcctttgctctcaccagatctgctggaagaagggattccacacacacagttaataaagcgcattttcaatacaccaaactcattgcaaccaaacactgatgttggctgacaacttccgctcaagctcaagcctaagacattggactgtaggtctctggaaagtagaggatggggaggctttgacagctgagtgccaactcccccaggggatgataatgctgggcccccagccccgcaccccagaagagagggactaacccctgtggatccaagtcttcatactcactgggactctttggaagctgaggctctggggatgtcagtcctgggttctcttccctgttttccttcagatccttctccaaggtctgcttgggtctcagagactttgggtcacctgttacgtcaatactcttgtgtagcagaaagtcctctccctgaagaggaaaaaccaagagtaatgactgctgtgtccaaactggtggaagcagggacacatctgtccccttctgattggatgcaacaactcttctaatgacacaggtgtggaaatacgtgcagacttcccctggaccaccccatcaccccacgtaaacatcaccatctcatttctgtgtctgtccctaatctgcaccctccatattccaaatcagctcctgtgcctggtggttttcactgtttggttctctgagcatatttctccccgccgtgccaacgtctccctgcacctgacactggaaggagcatgactctagtcgaggcccctcagctgtggcaccactggcattggggctgcatcaccctgctggagggggcgctcctgtgcagagcagagaccccacctccaccctctagatgctattaacaccccaccatcccctacaatgacacacaaaagcatctccagacatggccatgtgtccggaaaggcagaatcaccccagttgagaaacactcctcaaattaagaaattgacaatctgtagaaaatggtttccttgctgaattattacattaaatgtctttgaggaaactggctacggggaaggaatcttcattcatctgtgcaaactgcctccctcatttcactgagatcatttcttatgccccaccctaaatgctaaaagctctcatggtggagagaaaagtagatgaggcttccctctctgtgatggctcaggaatgaatgtttggggatgtatcatgtccatggggaatggctctaatcttgtcctgtgtcaaatctctcaatcagtccagcggccacacgatttcctcctgttccttctcccacctctgcccagacaccaaggcctcacacactcacctgcctcctggacaatgcagggaccctgggcaggatctgcagctctcggtgggcctggccttcccctggacgcatctggttcaccgaggaggcccgttggctggacacgtctttcagatcatctctgacactggagggggcttcagccatctcgatatctgagtcctgcacaatatattcctttccgtggaaggtgaccacagactgtagagagaaaaaagacaatcagactcaccatgagaacctgaaagtagctctcatattccctgggtcctgccataatgctcacactttactgtaattaatgttcaaatctgccttcccaatagagagtcagctctgtggacacagcaatcctgtctgaattttttcctctctagactccagcacctgcctgcgcctggaatattctagttaagtacataaacatgggtcctttagatgaaatagtctctaaaccaaagagaagacaaggagaaatattctgggtgaatccaactcaattggccgatggcagctcaccttgtattagaacttaggggctcatttggggacctgggggcagatccctgcatctgataccaaccactttccctgcttcaggatgggactcctgggccccccttcagttcactctaatgcctccttccctacattccatcaggcctaatatttcaccaatgtctttctttcatgttggcctcacacagtgtgtgggtccctgtaccccctctgcctgtccatctcctacaccaggaacttgccgtctcagcacagctgatattggaatctggatgattatttgtcatgatgggttgtcctgagcgttagagaacgcttagcagcgtctcctgtcctccctgacaacaaaaactgtccccagacactgccatgtgtccccgacgggcaaactctcctctacttggaagccctgacctagagcagcccctcgggtcctctcgagtccagctgcaccgtgcagcccccatcccagctccccttccctgcaccaatcacgagggtcccactcacccatttcttgggtcttctgttatttcgtagcaggtcctccaggtctttgcagctctgcacaccgttcatcatgactaagacctggagctcctggggcatggagatcatgaactgctccatcaccagcatgtccaggatctgctctttggtgtggaggtcgggcctcagccacagatggcacagctcagtgagtttcctcagagcctggatggggtccgactccttcgggcagctgaacatcctgaagttcacgtgagaaatctcagggtccacgtcgtgatttccaagttgagtttctgaggatgccatagaccgtggcagctccaacccaggtctgttgcaggattctcctagactccatgaggatgtgcaatttgcagccatatctagtggagaattttttaatcagtctctgagaaagctcttccagtagctggtatctaattgatacctatctacacaggcttcctctggttttcctcagtaatagattcactgttcattcagaagtctgggggggaaaagtatgagcctcattagtttaagttactactccatccatccctcccttcgaaatccctcatcctggatgccacttcttcagcagcatcgaattcagcacagtggaaatcttccagtgtctatacctgactacatactctggtttaaaatcttaatgacccctggattctgatctctaggaaatcactgtgcagaggctgaatcagttttcctgtcaattggaacaacattgttcttgactataaattaaataagatagttaggtgaagctctgaaaatgtgatgcaacaataaagtaagccctttatgtttccccatcaggacaagatccaaggcaaagcccttagtcataattatgcaaaaggatagagaaaaagagttagaatgtaatattttccccaacacatattcttgttaactccagaacatttacttgctccagggaagggacagcattaaaggatcctatgaggattaagcacctacacagatattttgttattttggtaaaatgtacattcataaatttcatcattttttactctcttcaagttcacgattttatgggactaagacatgcaccatgttgtacaaccattaccactgtttacttccagaattatctcatcaacccaaaagcaaccccatccccatcagtgatcaccccctgcccacccaccccagcccctagcaatcactaatctaccttctgtctctaagggtttctgtattcctaatctcatctcagaaaatggatttaaagtctagtgctctttgatattttaaagaagtgggttgatacaataataagatttttaaaaattaattcctaaacctagcttcattaggcaggagccactgagtgatactctccaggcatcaattatcgtccaagttcaacagctatgagaacacagccctgctttcctagacacaggtgggggaagcaacctgaaggtctgcagaggggagaaaaaactggcagaagggtcttgggaaaagtcactggtagcctggagggcgagtgccccacacttcctggaaggactttgagcaagtgcagaacagagagacagccagggagacaatcggcagaggcgggagacaacccagaggaggagacaatatttacacaccacacatctcacggggctcctgtgcaaaacataagcaactcaaactcctccagagcgagaaaacacataacccactagaagggcttaaggcgcctgtgtggacatctcagatgaagacatgtgaatggccagcaggtctaggaaaaggtgctcattatcactcatcatcagggacatgcaaatccaaaccacaaggcacccctcacgcctgctagagtggctgttcccaaaaagacacatggaacgagtgttggtgaggatttgggggaaaggggtcctctgcgccctgtgctgggatgtaaattagagcagccgatatgggagacagtatagaagctcctcagaaaattgaaagtccaacaactgcatgatccggcaatcccgctccggggcaggtacacagaggaaaggaaatcaggacgtggactccaaaacagtgaaactctggagggatagagggagggagggttgaaaaactacctattgggtactatcctcatatcctgggtgatgggtagagtcatacctcacacctcagcatcactcaatatactcatgcaacaaatctgcacaggtacccactgaatctaaaacacaagttcaaattacaaaaaaaaatttaaaaagaagtaaataacataaataataattaaaaacccagtggaactcatagtagtagtgagtagaatagttaccagggctggggtaggggttgggaagatataggtcaaagagtacaaatttcaattgaagaaatcaattcaaaagagcaattgtccaacatggtgacttcagttcataacaatgtattgtatacttggaaactgcttaaaaaaaattagatttcaagtattctcaaaaccaaaaatggttagtacatgaggtagggcatatgaatattagctcaatttagccatttaacaatgtttgtaatactacaaagcatattatgctatatgccataaatatatacaatttttagttttcaattagaagcaaattaatttttattgaaaaagcacacagatatgatagagaaaagggagcctgaaattctggaattaaaagtggttttgccagagggcgcctgctgctgctcaggaggcagaggcggaggtgggaggatcacttgagcccaagtgtttgataacagcctgggcaacatagtgagatcctgtctctaaaaaagaaagtggtttcatgttcctagaaatcactttgtatttgatcttagttcattccccgttaaagtaagaaacaagacacaggaaaaaataaaggcagacacaggagttagtattcaattctgggagtatataccacacgggtcacccaggtagggacacttagctcagattctcattggcctagtaggttgatgctcattcatcaatgatttgatttcaccctgtgcaaagggaaaatccagcaatgctttttaaaaagggtgtgtggcaggcaaagtggctcaggcctgtaattctaacaggttggaagaccgacatgggaacatgctagagcccaggagttcaggaccagcctgagcaatataccgagaccccatctctgcaaaaaaaaaattaaaaatttatccagtcgttgtggcatatgcctgtagtcccagctactcgggaggcggaggcgggcggatcgcttgagcccaggaattccaggctagtctggaattcaagcgagaccctgtctctaaaataaaataaaatataacctaagcttgatgagaaagttagtattattcctagtttacagaagcgttacataacgagtcagagttaatcatggggtgcaaaggagacccgctgccttcacaaagtctccgagaaaacgcacgaaaaaataaacccaaactttctgaaaccaacccccgacatgccagctcctaaacccgacagacatccccgctggacactcacctccttcccggcttctgcctccgaccttctcggtctgggatgcgctctccaaccggcctggagctgaactgcgtctatttatggagaagcgggactccaggccgcgtttccggttccctgcgccgccccgtgattggtttagggccatagagtccattttacgtaatcggcgttgattatggttcccactgaaaccccacccacaggaaattaatgtactaaacatgcctactgtgcaaatatttcccgctctactgagttgtcatactgctgaagtatttggtggcctcagaaaatatagatttgcgagttttaaccattttgggtcccctcatgccacagacagtaatatcctaacaagtaaagaacatgttaagagctggtggattagtatcaaaccagtgatttgatctagtttgagcaaagctctcacatatgaatgtcaagatactgaaaaaaagagacagtctttgttgatacataatgaatattggtgataattttttactgaaaaaaagagacagtctttgttgatacataatgaatattggtgataattttttattttttaaaaagaatattggagttgacatgggaaagctttgtttgaactagactaaatcagtggtttgatatcagccaacctacccttatataaaaacagtgggaaccagagaaaggcacatggtccccactctgcattcattccaggacggtgatagggtggtttatagatacactgagggtcctacggggttccctagttctcagcccccctcagttagggctctcaagcacgaaaagccttaacggtgggtgtgaattttactgtgtggatcatggagttaatgtggaatgataattaagtgctaggcaggattagattacaatttgggaagttcacaccatcagttggatgacactaatccattcaagtagtgactcattcattttaatttcagaggaaaccttctcgtctaacctttaggacaaattggagggctgttaattttacactgattctggtttaaatccttggaaaatcttaagccgcttcactctgggaacttcaaacttcttgggagtagaactttcctgatgtgttgttttgaagatgaagtaagactatgtcagtaaagtgctcaatacaaggttcattttgccaagaaattgtaacaattattttctgaggcatgttctcatactttgttacattttttcttgtttaccactgaggtgttgactctaactcaactctaacaaatgagttagagttaagaatggaattattcactggaattaactgggagctgcctaagccactctctggctacccaattcccgattcccctaaatcctcccctctgtaaactcatagtcttatttctgtgaagctgccgttggtattttggaagagaccgcatcgaatctgctgatgtctattaatagtatggtctttttcacattctatgaacatggctttccatttttggtggtcttttttgttttttttcattagcacttaatagtttttcttgtggaaatctttcacctccctggttaaatttattaccaggtttttaggggttcttttgctattgtaaatgggattgctttcttggtttttgttccactagcttgttggtgtataaaaacactactgatttttgcatgttgacttcgtatcctgtagttttactgaattcctttatcagttctgttttactggtggaggtttcaggtgtttttatagatgataacatgttgtttgcaaagagagacaattcgacttcctccttctgaatttggatgccctttattccttgctctggctaagactttcccaacacattattattatattattattattattttgagacaaagtgtcgctctgtcacccaggctcactgcaacctctgcctcttgggttcgagcaattatttgcctcagcctcccaagtagctgggatttcaggcacacgccaccatgcccggtgaatttttc[142 bp omitted]acaaaggtcaccagggtgaagtttggaaacaggtatacgttgtgatgcaatcgtcagaaccaagctagttaacatctccatcacctcacatagataccatgttctttccttcttattagttatttaactcttgggctcaagcaatcctgcttcagcctccctagcagctggggttacaggcacgagccacatctggctttctttttatttcttgatgtgtgtgtgtgtgtgtgtgtgtgtgtgtgtgtgtgtgtgttggaaacatttaagatacaccctctgagcaaatttcaagtatacagtacagatgctcctcgacttacaatgaagttacatcctgataaaccctattgtgaatgtaaaatatagaaaataaaaatgcatttactattaggtcacttactgaacatcagcacttagcctagcctaccttcgacgtgctcagaacatttacattcccctgcagtcaggcaaaatcattcacaggaaacctattttataatagagcactgaatatctcatgtcgtttattgaacattgtactgaaagtgacaatcagaatggtgtgtgaatattcctcagtaacgtacacagctgaaagcagaactttgagatcagactggcaacatggcaaaacccagtctctacaaaaaaacacgaaagttcactgggcattatggtgcaagcctgtagtcccagctacctgggagtctgaggcagaagaattgcttgagcctgggaggtcaaggttgcagtgagctgtgatcacgccactgcactccagccagggtaacagagccagaccctttctcaaaaaataaatgaatacataaatgttcccctcatacaaaaaagataagtatgcaagtcactcatatgtcaaattattagatttagcattgcacgttgtatatatgtatcaaaacattatgttgtacaccaaaaatgtgtatgtaccatttttatttgtaaatttataaagttaataataataatgacaaaaagaaaataatgccttctctaagaatgcgtgaccaaccaccatccttccctcatgggaatgtggagtttcccttgtcttggatgcctaacagacctgtcaatcaccacacatcccagacctaccacatctttccccacctcacgtaaaggtggctccagcccccttgatgtgcaatccacaagatttgtggggttatccttgattcctgcatttccctcacatgacacactcagtctctcaacaaatcctataccttaattaatgtgtttattgacatgaatttcacgtgacataaaattaactgttttatctgtacagtttagcagcatttggtgcatttacactgctgtgcagcagctcctctagctggttcctgtgcctgcatgtccagagtccaagttctgacatttgtacatactcatgaagtcattgccgtcatcaagaagctgaacatccccaccatcctccaacgcttccccaggctcttcatcatctgtccctcccacagctccatccctggacaaccactggtgttctctgtgtcattacagatcacggacagaattttcttttttctttctttttttcttttctttttttttgagacagtgtcttgctctgttgcccaggctgcagtgcagtggtatgatcacggctcactgcagcctcaacttctcagccttaagtgaacctcctacctcagcccccccaggtggctgggaccactatgtccggctaattttttctactttttgtagagatgggtctcactacattgcctaggctgatcttgaactcctgggctcaagcaatccacctgcttttgcctcccaaagtgctgagattacatgtgtcagccactgtgcccagcctagtaatagaattttctagaattttatattgatagactcataccagatgcactttttttctggctgtcccctttcaccttcgtaactattttgagattcatccatgttcttgggtgttatcaatgatttctttttactgctgagtagtattccaaactttattaaattgggccctttggatatgagttatttattttatatcaactgtacctcaataagaccatgaaaaaaaaagaggattctcttaaaacttgaaaacaagttcagaatctgaccagctctcctcatctcaactaccagtactcatgggcaagccacagccatcaacctggctgactctgctgtgatccacactgagctcttttttcttccccttcccctatataggctaatttttttttctttttctttttctttttttcagacagggtcttgctctgttgcccaggctgaagcacagttgcacaatcatagctcactgcagcctccacctctcaggctcaagcaatcctctcacctcagcttccccagtagctgcgaccacaggtgtgcaccaccaggcctggctaattgttttgtatgtttttgtagacaccgagtttcaccatgttgcccaggctggtctttaactcctggacccaagcaatccaccagcctcagcttcttaaagtgctaggattacaggcatcagccatcatgtctgactatatgggcttatttccaagactttattccaaaaaaaatgttaaacagaagtcagaaagctactctatgaaggcagaggcattcgttggagctgtgagtgatgtacctgcaatgtctagattctaattttaggagttggcagtgtcaacccaattctgtctcaacactattcaatgactcaaataatggcagctccacctactagtacaatgggtcaagtttttacatttcacatgtgcctacaggatggggcctggcaggcttgagatgagacttctgcttgtttctatttagcttcagactgttgagaaagtcaggtcatggcattcatttagtccaaacatcattgtctataaaaacggtgtccacgttttgtctttgaaatggtccccgccctccgctcgttatcgtgttgagaatgaaatgagaggacatgcttggcacctggagatgattggatattacagctgtgcgccataagggcaaatggttccattgtttgatgagccatcctggcggtgggtggatcattcacttctaaacagataaggaatggctagaaagttcttgtaccaaaccaacttgaagcaacctcacccacaccgaatcctatacttttctatgaaatcacctttttttttttttttggagatctccaactttttttcacagctgcttaaaaaaaaatactactgttcaccccagactttcttttgatacactaagtaaacaaaacagattttttttttttgccataaatatcagcagacacttcctggcaccccacactgtatcagcatgtgtgttaacagtcccagttcagatgtgcagtgtttcaagtggatgcactgtaacaaggatgcaaatgcggagccaccctcagaataacattcagtcatggggttgcccttccaagctggcagaaaaggaacccgggccaggcaccgtgagcacgcacagtaactcacgcctgtaatcccagcactctggaaggctgaggcaggaggatttcttgagaccaggaatttgagaccagcctgggcaacatagtgagacccaactctacaaataagagattgtgtgtccggaggctgaactcacaaagatttcagaatgtcagtaggagaggaggtgtgtgggatagcagccaattcgtcagtgaatgaggcagagaaattggtaaaaagaaggaaagtgaaaacaagaagcatgttcccattttcaaggtcttcctggttcacaaagtgggaaggaagaaactactgaagaggaaagagttctcttgaagagtacagaattcctgggctccccggttcaggtcataaaaagaaaagagaaaacgtttgcagccatgcagggtgaacaagctctgaagatatattatacggactaggggttgtaatcaatgttagggaccatcccctacttctgagggctctgaggcaggagaatagggtgagggaagagagagaccctctcatattgttttatattgttttatactcaatacctgttttaaaaaaaaaacaacaaggaagtaaaaccaaagacaggcagcccggcgccaggcccgaaaccaggcctgggcctgcctggcctaaacccagtagttaaaaatcaactgataacttaaaaaccgatgttattcatagattccagacattgtatagaacaacattgtgaaactccctgccctgttctgtttctctctgaccaccggtgcatgcagcccctgtcacgtaccccttgcttgctcaaatcaatcacgaccctttcatgtgaaatccttagagttgtgagcccttaaaagggacaggaattgctcactcgtggagctcggatttcaaggcagtagcttgccaatgctcccagctgaataaagcccttccttctacaactcggtgtctgagaggtttcgtctgtggctcgtcctactacaagggaattagggtaaccaggggttaaggtagaagcaaaagaaccgcacttgcagccagttctaggcaagattaggcagcacacaggccacatcctcactcctgtgataacgagacagaagcctccactccagcctctgattgaccgtgggccaagcctccactccaacctctgatggacggtgggccaagcctccactccaacctctgatggacggtgggccaagcctccactccagcctctgattgaccgtgggccaagtctccactccagcctctgatggacggtgggccaagtctccactccagcctctgatggaccgtgggccaagtctccactccagcctctgatggatggtgggccaagcctccactccagcctctgatggaccgtgggccaagtctccactccagcctctgatggacggtgggccaagtctccactccagcctctgatggaccgtgggccaagtctccactccagcctctgatggatggtgggccaagcctccactccagcctctgatggacggtgggccaagcctccactccagcctctgatggacggtgggccaagtctccactccagcctctgatggacggtgggccaagcctccactccagcctctgattgaccgtgggccaagtctccactccagcctctgatggacggtgggccaagcctccactccagcctctgattgaccgtgggccaagtctccactccagcctctgatggacggtgggccaagtctccactccagcctctgatggaccgtgggccaagtctccactccagcctctgatggatggtgggccaagcctccactccagtctctgatggacggtgggccaagtctccactccagcctctgatggacagtgggccaagtctccactccagcctctgatggacggtgggccaagcctccactccagcctctgatggacggtgggccaagcctccattccagcctctgatggacggtgggccaagtctccactccagcctctgatggatggtgggccaagcctccactccagcctctgatggacggtgggccaagcctccactccagcctctgattgaccgtgggccaagcctccactccaacctctgatggacggtgggccaagcctccactccagcctctgatggacggtgggccaagtctccactccagcctctgatggacggtgggccaagcctccactccagcctctgatggacggtgggccaagtctccactccagcctctgatggacggtgggccaagcctccactccagcctctgatggacggtgggccaagcctccattccagcctctgatggacggtgggccaagtctccactccagcctctgattgaccgtgggccaagcctccactccagcctctgatggacggtgggccaagtctccactccagcctctgatggacggtgggccaagcctccactccagcctctgatggacggtgggccaagcctccattccagcctctgattgaccgtgggccaagcctccactccaacctctgatggacggtgggccaagcctccattccagcctctgatggacggtgggccaagtctccactccagcctctgatggatggtgggccaagcctccactccagcctctgatggacggtgggccaagtctccactccagcctctgatggacggtgggccaagcctccactccagcctctgatggacggtgggccaagcctccattccagcctctgatggacggtgggccaagcctccattccagcctctgatggacggtgggccacgcctccactccaacctctgattgaccgtgggccaagcctccactccagcctctgatggacggtgggccaagcctccattccagcctctgatggacggtgggccaagcctccactccaacctctgattgaccgtgggccaagcctccactccagcctctgatggacggtgggccaagtctccactccagcctctgatggatggtgggccaagcctccactccagcctctgacggacggtgggccaagtctccacgtcagcctctgactggtcgcaggtcagtccttcacggggtgtagccaatgggaggcctgtcaaagacaccgaggggtattgccgggttccttttaataaaaaccctaattgaggaagctcttgggcctcttgctggagccccgctcccagtctgtgaattgtcttcaataaacctgtgctttccttactccgtttttttgtgtttttgtctttcgttgctttgttcttttgttactttgtgcgtttcattcaattctctgttcaacacgcctagaacgtggacaactccatccggtaacagctccacgtacaatttttctcctttgcggcggtgctttcagctgtgcacattgctgaggaggatccacaccgccattctgattgtcactttcagttcagtattcaataaactacaggagagagtcaacactttattataaaataggttttctgttggacgattttgcccaactgtaggggaaggtacgtgttcagggcgggtttagggtaggctaggctaaactctgatgttttgtaggtgacataatattaaatgcattttttatcttctatattttcaatttatcaggatgtgacttcgctgtacgttgaagagcatccacactgtatcgcatacttgaaatttgctgagaagatcgattatgggccggggcgcggtggctcatgcctgtaattccattaatttgggaagctgagacgggcggatcgcttgagctcaggagtttgagaccagcctgggcaacatggcgaaaccccgtctctacaaataatataaaaattagccgggcatgggtggcgcctgtattcccagctgcttgggaggaagaggcagtaggatcatttgagcccgggaggtggaggttgcagtgacctgagattgtgccactgtgctccagcctgggtggcagagtgaggttctgtctcaaaaataaaaaaaatttaaaaaatgatagatcataagtgtttcaccacagacacacggacacacacacatacacacatacgcacacatacacacacacgtcaaagaaacaaaaagcaagccaggagtcgtggcatatgtgtctagtcccctagacacacacagagacacacccggacacacggaaacacatacgaacacacacccacacacagacacacacatggacatacacacatacgcacacatacacacacacacgtcaaagaaacaaaaagcaagccaggggttgtggcatatgctcttagtccccactactggggaggctgaggcaggaggattacttgaggccaggaattaagcaaataaataatgaaatgaaaatagtcactatgtgagttgacgaatacattaattagcttgattgtagtataattacaccatgaatagggatatgtaaacaccagcatggtgaccttagtcaccaaggacaggtagaggccaggaattggagagcagcctgggcaacacagtgatacccccatctttacaaaaaaatcttttaaaattagccaagtgtggtggtgcttgcctgtaattccagatactcactcaggaggctggagcaggaggctctcttgagcccaggggttcaaggctgcagtgagctatgagttttccattgcacccagccaaggtgagtgagaccttggctctaaaaataaatcaatcaataaacaaatttatccacacaggtaggagatctctacaagaaaaactataaaatactgatgagaggaaatgaagagggcacacaaatggaaagatagtccatgttcataaatcggaagaattcacattgtgaaaatgaccacactattaatagagatctatagatccaactcaatccctaccaaaatgccaaggacattccttatgagaacatgacatgtttcaagaggagaggactggagggaattgggtaggtagatggtggttttaggcagattctagttcattccacttaataactccattctgaactgactcactatcaacgcctcaattcttaacaaggaaaaatatcacaaagtatgagaaaatgcatcaggaaataagtgtcagaactttttggcaaaatgaccttgtgtcgggcactttactgacataatcttatatcatcttccaaagaacatatcaggaaggtaataattccctggttctattcacagggagcttgaagttcacaaaattcagtggcttaagatttcccaaggatttaaaccagaatcagtgtaatattaataacccttcaatgtatgttaagtgttagatgagaaaatttactctgaattaaaaatgaatgagccacaatttgaatggatttgtgaatcagtcagcggatgctgcgaacttcccaaattgtaacctaatcatgtaatctaatcatgacactcagttttcattccacaatgactccatgatccacgcagtataattcacacctaacattaaggcttttcacgtttgagaggcctcagtcagggggctgagaaccagggaaccctgtaggaccctcagtgtatctataaaccaccctctcaccgtcctggagtgagtgcagagtggggaccatgtgcctttctctggttcccactgtttttacataagggtaggttggctgatatcaaaccagtgatttagactagttcaagcaaagcttttccatgtgaattccaagagtttgaaaaagaaaagtaaagaattatcactaatatttattgtatatcagcaatgactgtatttttcaatatactgacattaatatgtgaaaggctttgcttaaactgcattaaatcactggtttgatattaatccaacaactcttaacatgtcctttatttgttaggatattactgtctgtgtggcgcgaggggacccaaagtgattaaaacttgtggacctagggccaggtgtggtggctcacgcctgtaatctcagcactttgggaggc[134 bp omitted]gaggcaggagaatcgcttgaacccaggaggtggagcttgcagtgagccgagatcacgccactgaactctagcctgggggacagtgtgagactctgtctcaaaaaaaaccaaaagaagaaaaaaaaacccataaaaccaaacaaaaaaaaacttgtggatctatattttctgaggcctccaaatacttcagcaatatgacaaataattcagtagagtgggaaaacctatgttatttgcacagtaggcatgtttaatactttaacttcctgtgggcagggtttcattgggaaatgtaatcaactcggatcacctaaaatggattacgtggccctaaaccaatcatggggcagtgcaggaactggaaatggggcctggagtccttcgacttctccataaataggcgcagttcagctccaggccagttggagagtgcatcccagatgcgagaaagttggaggcataaggcgggaaggaggtaagtgtccagaggccatgtctgtggggtttaggagctggcatgcaggggggttagtttcagaaagatttgggtttattttctcatgcatttgcttggagaccttgtgaaagcatcgggtctcctttgcaccccgtgattaactctggcttgttatgaaacccttatgtaaactaggaataatattaactttctcatcatgggtaggttacattttagagacgggggtctcactcattgcccaggctggcttgaattcctggtctccagtcattggcgagacttcacttcaccatcagctgggacgacaggcacctacctgccaacaggcccggctacattttatttttttgtagagatggggtctcggtatgttgcacaggctggtcttgaactcctaggctcaagcaatcataccacctgggtcttccaaactgttggaattacaggcgtgagccaccttgccggccgcactccacttgttaaaaagcatcactggattttccctttccacagggtaaaatcagccattaatgaatgagcatcaacctactaggccaatgagaatgtgcactaagtgtccctacctgggggtcctgtgtgctatatactcccagaattgaatactaacccgcatacctgcctttattttttcccatgttccattgcttgctttaatgggaaaagaactgagagtgaatacacggtgatttctaggaacatgaaaccacttttttaagagacaggatctcactatgttgcccaggctgttatcaaactcctgggctcaagtgatcctcttgccttggcctgagcagcagcaggcgcccttgcagcaaagccacttttaattccagaattttaggctctcttttctctctcatatttgtatgcttttttcaaaaaaaattaatttgctttcaaattgaaaactaaaaattgtatacaattgggcacagcataatgtgctttgtaggatgtgaacgctgtaaaatggctaaattaagctgctattcacatgccttactttatgtactaatcatttttggctgtgagaatacttgattgaaatctactcttttagcaatttccaagcatacattgttatgaactgaagtcaccatgttggacaacggctctcttgaattcatctctccaactgaaatttgtacccttagacctatatctccccaacccccatcccagccctggtaaccaccattctactcactgctactatgagtccactaggcttttaaaattattattcatgtcatctacttcttttttaattttttaaatgattttaacttgtattttagattcgctgggtgcctgtgcagatttgttacatgagtgtattgagtgatgctgagatttggggtatgactcaacccgtcacccaggatgtgaggagcacccgataggtagtttttcaaccctccctccctctatccctccagagtttcactgttttggagtccacgtcctgatttcctttcctctgtgtacctgccccggagcgggattgccggatcatgcagttgttggactttcaattttctgaggagcttctatactgtctcccatatcggctgctctaatttacatcccagcacggggcgcagaggacccctttcccccgaatcctcaccaacactcgttccatgtgtctttttgggaacagccactctagcaggcgtgaggggtgccttgtggtttggatttgcatgtccctgatgatgagtgatgacgagcaccttttcctagacctgctggccattcacatgtcttcatctgaggtgtccacagaggcaccttgcccacttctagcgggttatgtgttttcttgctctggagtagtttgagttgcttatgttttgcacaggaactgcttgtgagatgtgtggtgtgtaaatattgtctcctctgggttgtcttccccctctgctgattgtctccctggctgtctctgtgttctgtacttgctcagattccttccaggaagcgtaggttttccatccttcaggattccagtgacctttcccgagaccctcctgtcaattctttcttccttctgaagacctttcggttgcttcccccacctgtggctaggaagacagggctgcgttctcacagctgttgaacttggataataactgatgcctggagagtatcacacagtgtgtcctgcctaatgaaactacatttagaaccaaatttcaaaaaatcgttctttctttctctcttttttttttgagacggagtctcgctcttgttgcccaggctggagtgcaatggcgtgatgtcggctcactacaacttccacctccctgattcaagtgattctcctgcctcagactgccaagtagctaggattacaggcacgtgccaccatgcccggctaatttttgtattttgagtagagacgaagtttcaccatcttggtcaggctggtctcgaactcctgacctcaagtgatcctcccgtcttggcctcccaaagtgttgggactacaggcatgagccaccacacctggcctcaaaaaatctatcgtattatttcacttcctgaaaatttcatagagcactagactttaaatccattttctgagatgagattaggaatagagaaacccttagagacagaaggtagatcagtgattggcaggggctggggtgggtgggcagagggtgatcattgatggggatggggttccttttgggctgatgagacaattctggagctagacagtggtgatggttgcacagcatggtgcatgcatgtcttagtgccatgaaattgtgcacttcaagatggtaaaaatgatgaaatttatgaatgtgcattttaccaaaatagcaatatctgtgtaggagttgaattctcatgattacttaatgctctcccttccctggagcaaacaaatgtcctggggttaacaagaaaaggtgttgggggacaactgtaggttgtaactatttttctctatctttgtgcgtaattatgatgaagggctttaccttggatcttgtctggacaggaaaacataaataagttattgttgcatcagattttaggagcttcacataagtatcctatttaatttacagttgggaaccatgttgttccaattgaaaaaaaaactgatttcacttctgcacaatgatttcctggagatcagaatccaggggagcattaggattttaaatcagaacatatagtcaggtgtagacagcggaagagtaacagggtgggttgatttccactgtgctgaattcgatgctgctgaagaagtggcgtccaggatttggatgagggttttggaagggatgggtggatagactagaaactttgatcgggctcatgtttttttttgcagacttctgaacagtgaatctattattgaggaaaaccaaaggaggcctgtctagataggtctcaattagacaccagctactggaagaactttctcagagactgactgaaatattctccaccagatatggctgcaaattgcaactcctcatggggtcagggaggaccctgcaacagccctgagtcagagccgccacagtctgtggcttccccagaaactcaacttggaaatcatgactgggaccctgagacttgtcacgtgaacttcaggatgttcagctgcccagaggagtcggaccccatccaggctctgaggaaactcactgagctgtgccatctgtggctgaggcccgacctccacaccaaagagcagatcctggacatgctggtgatggagcagttcatgatctccatgccccaggagctccaggtcttagtcaaggtgaacggtgtgcagagctgcaaagacctggaggacctgctacgaaataacagaagacccaagaaatgggtgagtgggaccctcgtgactggtgcagggaaggggagctgggatgggggctgcacggtgcagctggactcgagaggacccgaggggctgctctaggtcagggcttccaagtagaggagagtttgcccatcagggacacatggcagtgtctggggacagtttttgttgtcacaagggggaggacaggagacgctgctaagcattctctaatgctcaggacaacccaccatgacaaataatcttccagattccaatatcagctgtgctgagacggcaagttcctggtgtaggagatggacaggcagagggggtacagggacccacacactgtgtgaggccaacatgaaagaaagacattggtgaaatattaggtctgatggaatgtagggaaggaggcattagagtgaactgaagcggggcccaggagtcccatcctgaagcagggaaagtggttggtatcagatgcagggatctgcctccaggtccccaaatgagcccctaagttctaatacaaggtgagctgccatcggccaattgagttggattcacccagaatatttctccttgtcttctctttggtttagagaccctttcatctaaaggactcatatttatgtacttatgtagaaaaggaaaaaattcagacagattgctgtgtccacagagctgattctgcattgggaaggcagatttgaacattacagtaaagtgtgagcattatggcaggacccagggaatatgagagctactttcaggttctcatagtgagtctgattgtcttttttctctctacagtctgtggtcaattttcttggcaaggaatatcttatgcaggaatcagatgtcgagatggctgaaatccctgccagtgtcagagatgatccgagaggcgtgtccagccagcgggcctcctctgtgaatgagatgcgtccgggggaaggccaggccagccaagagctgcagaccctgcccagggtccctgcactgtccagaaggcaggtgagtgtgtgaggccctggtgtctgggcagaggtgggagaaggaacaggagaaaactgagtgtgcctctggactgattgagagatttggcacaggacaagaacagagacattccccatggatgtgttacatccttagacattcctgagtcatcacagagaatgaagcctcatctacttttctctccaccatgagagcttttagcatgtagggtggggggtcagaaatggtctcagtgaaatgagggaggcagttggcaccgatgaatgaactgaaggtcccttccccattcagtttcctcaaagacatttaatgtcataattcagcaaggagcgcactttctacagattgtcaatttcttaatttgaggagtgtttctcaactggggtgattttgcctttcaggacacatggccatgtctggagatgtgtttgtgtgtcattgtagggggtggtggggtgttgatagcatctagagggtggaggcggggtctctgctctgcacaggagcgccccctccaggagggtgatgcagccccaatgccagtggtgccaggggttaggggcctccacctagagtcatgctccttccagtgtcaggggcagggagacgttggcacagcggggagaaatatgctcagagaaccaaacagtgaaaaccaccaggcacaggagctgatttagaatatggagggtgcagattagggagagactcagaaatgaggtggtgatgtttatttgggatgatgtgggaggcccataggaagtctgcacgtatccctaaacctgtgtcattagaaaagttggtgtatccagtcaggaagggacagtgatgtccatgacccaccagtttagacagggcagtcattgctgttggttttccattgtcaggaagaggacttcctgctgccagagactactgtcatgaaaagtgccccaaaggctctgagacccaagccaaccttggagaaggatctgaacgtagacagggaagaaaacacgggacttacatccccagagcctcagcttccaaacggtcctagtgagtatgaagacttggatccacaggggttagcccctctcttctggggtgtggggctggggtcccagcattatcatgtctgggggagttggcactcagctgccaaagcctctccatcccttactctccagagacctacggtccaatgtcttaggtttaaggttgaggggaagttgtcagccaacatcagtgtttggttgcaatgagtttggtgtattgaaaatgtaccttattaactgttgtgtgtggaatcccttcttccagcaggtgtggtgggagcaaaggaggggaaggaacccaaaaaaagagcctctgtcgaaaatgtggatgctgacacaccttctgcctgcgttgtggagagagaagcttcgactcacagcgggagcagaggagacgctctgaatctgagatgtcccaaaagaagcaaaccagacgccacctccatttcccaagaagggcctcaaggaggagccacacctgtgggcaacagcgaatccccaggaaaacctgagataaattcagtttattccccaggccctgcaggtgcagtcagtcaccccaatggccaagaagccaaggaactgctgccctttgcatgtggcgtgtgcaataagaggtttacgtgtaattccaagctagccatccacatgagatcacacacaggagagagaccctttcaatgtaatttctgtgagaggtgcttcacgcagctctcagacctccgcgtccaccagcgaatccacactggtgagaagccctacacatgtgacatctgtcacaaacggttcaacaggatgttctccttgaagtgtcacaagaggagccacacgggggagaagccctataaatgtaaggactgcaaccaagttttcacctacaggaagaacctgaacgagcacaagctcatccactccggagagaaaccctataaatgtcccaagtgtctaagagcctttcgtcggcctgaaacgttaaaataccaccagaaaacacatcaagaaaccactgcacccagagaatgtgaaggatgatttttcactgacgctattagatgagatatgacatgaagcaggtgcaagggcgcctggcacacagagggagtgccctagataggaattgccaggatgtcggagtaaatattcattctccccacagagctttattttctgtttcattaggtccattgttttcgtacaggtttatgtgggtgtgtgttgctgttctttcttttattattttttttgagacggagtcttgttctgtcacccaggctggagtgcagtggtgcgatctcggctcactgccagctcagtctcccaggttcacatcattctcctgcctcagcctcccgagtagctgggactacaggcgcctgcca[195 bp omitted]aaaacggagccttctgattgacatgctattacccactgttttgctgtaaattaaagttgtcaaagtaggtgtccagattaaatacacaatgcctggggaaatctgtgtttcaaataaacaatttttttttagtatcagcttgttctaaattattcattatttatctgaaactcagcttctattgggtatcctgtattgttttcttttttgcttctttttcttctcttttcttttcttttgagatggggcctcactctttcacccaggctgcagtgcagtggtgtaatcacagctcactgcagacctgacctccacggctcaagcaattctgccgtcttggccgccggagtagctgggactagaacacaccacaccatgtcagctaatttttgtatttttttgtagagaggggttttgccacgttgcccagcctggtcttgaactcctgagttcaagtgatctgcctgcctcggccccccaaagtgctattacgggtgtgagccactgcatcctgtattgtttgtattaggctttattagtattattttattcaaattttttgaaataattttttgtagtgatgggatctggttttgttgccaaggctggtctcaaagtcctggcctcaagcgatccttccaccttggcctccagaagtgctcggagtatacgtgtgagccaccacgcctggctaatgactttttcagagctgttttaggttcacagggaaattcagtggacagcacagagttcccctagactccctccccacacggcacagcctctccccgcccagcatccccagcagagcggtgcacctgttccatcagtgagcctgcctggacatatcaccaccacccagagtccatggtgttcattagggctcgctctgggtgttgtacatcctgtgggtttggacaaaggcctcatgagtatccaccactggagtatcatgggggatattttcactgccccccccgaatcctctctgctctgcctatttatctccccgccccagatggtgtatttcttggtctaaatttggcaacttctaaattcctgatttgaatcttgaactacagaggcattgggagtctctggtgactagttggtcttagtgatagtaccacatcctgaaggctttgctaatctacaaaagggtgggccctgatcccagagcttccagtttagtagatcaggggtgtggccttagagtttgcattgaaaaatagacttcattttattttagaccaagtctcactctgtcacccaggctggctggagtgcagtcgcgcaatctcggctcaccccaacctccacctcccgggttgaagcaattcacttgcctcagccttctgagtagctgcaattacaggtgtgccgccaccacgcctggctaattttttatttttagtagagacagggtttcgccatgttggccaggctggtctggagcttctgatcttgggtgatctgcctggctcagcctcccaatgtgctgggattacatgagcacgagccgccatacctggccttagatttcatcttagaatatctttcaaaagtctatagagctcgccaatgctctgcaccatttcccccactgttcacatggttctttaatacggcacatttgccacaagcgatgagctgactctgtatattgctgtgaactcaggtgcctattttattgagacctcctcagtgttgatacgatggcctcctcttccttcttttccatccaaggcgccacattgccttgagttgtcatgcctccctaggctcctcttggtgaaaatttctcagattttacttgttttaaataacctgagcatctgcattttcagtgatgctgatgctgctggtcttgggagggtatttcatgaatggctggttgagctcacagaggcagagaccagagatcctcagaactccggaaataggctggattcatttattaaagttcactgttgtgacacctcggttcttgtcttcttaatttaaaggaatgtaaacaatagacacacagtaaaagagatgcagcatagagtaattcattgcaaaggaataagaaaattttgaaaggtaagggcagaatagacaggacaccctgagagagtggatttaaggctggctgctcctaaggataagatagcaaagacctgctcaagagcgactccctttctccatccccagacaattttgaaacatattgatgcctgactctcaccctcaagagatacgagtttgagtcgatacttggaaatcaggtttaaaaaatttttccaggtaattctaatgtgcaacaaaggttgagaaccactggtgtacagtataaagagaaatttctagcatctcgcttcatttactgtaacctcgtggccctcaaatttttaatgtgcatataattcaccctcagatcttgttaaaatgcagggtctgattcagtgacaggctccaggtgaggcacatgctgctcgtcaatagaccctcatttcagtggtgaggaggcagtctcctctgggttccagctttgcatcaactgagcaaaatcttaccatctcttactgctcaagtcagcatcttgaggccagtgtctgataagtgcatttgaaatattcaatccttctggtttcttacccagaatgctacactaagtgttttatttctcccacatccgctcctacccaacggctttccacccattatcacatggcagccatactgagtatgaaagtgagcaaatctaatcctgctgttacactctttacattttattttctatggattctattctttttagcaaaaagaccatgtgctttatgtggcctaagctattcaactaaatgaccactgatcccagcactttgggaggccaaggcaggcagatcacgagggcaaaagatcaagaccatcctggctaacacagtgaaatcctgtctctactaaaaatacaaaaaattagtcaggtgtggtggcatgcacctgtagtcccagctacttgggaagctggggcaggagaatcgcttgaacccgggtggcagagattgcagtgagccaagatcgtgccactgcactccagcctgggcaacagagctagactccgtgtaaaaaaaaaaaaaaaaaagaccactgatgacccttgtgactgtcagtctctgttaccctccgtacttcaggaagacccttctgtattcagtgactgactgggggtgcctttctccatgatgtttaatttttttgaatgggggatgtctatggcccatttttggtgcttttctgtgtagttgaagatacactagttttggacttttggcctttatccactttctagcgtattctttctctggggaaaaatgattgggagtttcgaaagagaatctgcattgagaagctgtatcagtcagagtccaatgaagagaaaaaaacccacagcaatttgcacaagcagcatttaatataaagcaggggctggcacacgatggcctgctaccttcaatagcccacagctagaaaatagttttgtgtgtgtgtgttttacagggtcttattctgtcactcaggatggagtgcagtagcatgatcatagcttactgaagccttgatctcctgggcaccagcttccagcaggtgattgtgttaagtgaaataagccagtccaagttatcctgcccgctcagcctggctaatttttaaatgtttttatagagacagtgtctcactatgttgcccaggccagtctcaaagtcctgagctcaattgatcttcctgccttggccttccaaagcgctggaattacagatgtgaaccagcacacctgggcaagaattgttttttatatttttaaagtgtggtaatatgagcaaaccagagaagaatatccaacatagaccaaatagcctgcaaaacctaaaatatatattctctgctcctttgtggaaaaaagctttctgacctccaaaataaagatttattgaccacaacatgggcctaactataaagaaaaaagaattctgaaggatacctagggaggaaggtttctcagaggaatgggaatccattgacaaattttaaagaatggagcagcacaattgggtttacctaatttaaagctcaacatgcctgtcaagtgataatggattggagggtgctgggtaagagaggatatgggagcaatcaagattctcttatggttttctgggagagaaaaaggagaactgatggattcaggtgcacctacccaaacctggcttgagcaggtgagaggctgtaacaacgcaaaggttggggccgcccaggagaaaaaggattacaccacccaaaattgagtttgaatgttaagactgaggacacacacatacccacactccaagagggtatgaagcttattacataacaggatttctgaagagagcagagtgggctttcccaagctggtctgaatgtggcttgagagggcagagaaaggaggctggtttggggttggggttttatggtgcttaggggatgggccacagccaggggtactgcacagggtttgaactccccactggcactagaagagggagtacccaggttttctaatcagcttgtccagctgtggggtgataagaaacaaacatcaaacatggtcaaacttttaataatcccaaggaaagagcaagtcaaaagtggaggtatgaacctcaacgtctgggtgaggcctctggttgggcaagggtgggaccatggtcaccaggggaaataggaggcagccttctggggtccaggggccaaggctggtggctggagtatggagaggcctgtggtaaggcagccacaggcaggagctggggtcgtgaacacgccagggggccccattcacgtggggctgacaaggccataacaggagcaagaagaaagacaagatggcggcgcagtggcgcctcttcctcctgggatatccctcccaccccctctagtggcagagcctagcactgcgctccctgcaaagttgccaggacagctccgtgattgcagggccggcactgaacctgtggacttagaagctgggaggcaattgactggtaactgacacagaagccctgttcctttcccttgcagaggtgtgagcctataggttcagttactctggaggctgaggtgggaggatcacctgagcctgggaattttgagctgtgattgtgccactgcactccagcttgggtgacagagcaagaggctgtctcaaaaaaaaaaaaaaaaaaagtcctctggatggtcagaagagcaacagaaggtgggcagggaggaggggtggagggggagagaaaaaaagatggagagagaaatttgtggaccccaagaatatagctcacctagaaaggttggaacacctgaaatggaagtagtggcttgtccgcaggatcatagaacttgtaaaagaatcccgtgcaccaaataaagcacgcaaataacaggaaaatgccagaaagctgaacacctgggtggcagtctgtgcaccccagtgaagggacgtgaacaagtggctcccatcggtgtgctggcaagacacacactggctggaggtgagggttgtgatattaaggactgaggtgaacagttttgaacgttgggatgtcaacagaatgaggacgcgtggggagacgttatccggtgttacagacactaaatacatttttttttcttacaataagaagttgaagatctgagtggatgagaactggagaaagtagggatgcagtgtctcttcgtcaattcaggttttgcacggggtaaggtggctgtgtctaagccggtgccactagcatcatacgcacccagcttatgttaaaaatttaaagttagaatgattttatagctaatttgtatagttatgacagatgtccagcagatggcagaaaagatcttgttctaacagataacagctagatggttctgcttctgtttgacattaaacataaccaaagcgtcaaacaacagaaaaggttatctaactgatataccagtgaatgagcatctttttttttttttttaaataagtcttcctcttctgttagtgtgaggctaaatttggtggttcatatgatggttcactcgatctgacatttttttcttgtactctactagaatgtatatttaaattttataatgaaatattttattattatacaaatcattgttgttggtcccaaagtattacataaactttggttgctatatataattacattctaattagtgtatagactattttatttattatacaatttcaggaggagaccaatgttttcatcatcttacctattagttgtaacaaattctaggataaactgctaacattattatattattttttctggtgtcaaatgaggtctttgtagcatgtgtcacaatgtcctccctttggaaaggggaataatattccattgtacagatggaccatattttgtttatctattccttcagtgaacgcttgggtagctcctacttctgagctattgtgaataacgttgcaatgaacataggagtatgagttcctgcttccaattttttaggtacataagcagaagtggcattcctggattatatcgtaattctatgtttaatttttggggggggctgccatgctgttttccttgtgtattaacagtataccagggttcccatttctccacatccttggcaaaatttgttattttctgttttttgatagcagtggtgtggttttgatttacatttccctaattattagtgaggtggagtgccttttcttgtgtctgttggccatttgtagaccttctttggagaaatgtctaagttctttgcccattttaaaatcatgttgttagtgttttgttgttgagttagcgttctttatatactctggagatgaaccccttttcagatatgtaatgtgcgaatatggtatccccctattccattggttgctttcactctgttgattgtgacctttgatgcaaaaactgtgagttttaaaatatatattttaaaatatatattttcttattacaattttatttaggaataagtgaggtacagtaaatggcacgttatcagtttatgatttgtcgtgttctgacattttcacaggctttctgcatttttaaagctgctcccattggaaacaggaaaggaacttccattttagttaggaaagcttttgaataatatttagatagtccaaaaaatacacaaagtgatatataacctacaattccaagaacgtcaatattgagcaaagcgtggacaatagccggctgagcgcacaaggtggggagtggggagggaagctatggatttgcctgtggtagggaagactttgcccagtcagccacagagaattagaaagtctgccgcccgctgctgcccacgagcaaacagaaaaacaaaaaacccaacctgcctcagtgctcacaggccgactctgtgccgtagcccagtgcaactctccacctgccatctcactgtttcactccctctaacgggtccacgttgattaattcccaaacccctcttgcctgtgacccaacgtggtttttccctttggctttttttttttctccctcaaagaagctgtttttcttgccagccctgagatgggttgaataaactgatcataattacacagcctacctggacggatgaaaaacatggtgtcgtctattctcagggtccctaggagggttgttagggtggttttaatgagtcccaaagcacctggctctatttctgcccgttgagctgctaaactggcatcaaaaagttaactctgaggaggcagaaaacatgatttgttaactgctggcctcaagggtgacttgatttatttcagggcttatttaaaaaacagtaattattgcctgtttccaatcctgaagataacatacatgcatgtagtgaatacatttggaaattgtattcccatgaaacttttaatgagatatttgaatagaacttgttaagtagctggtaaagttcagaagagaaaatgcacacacactaaaaaactagaaacacaataaaaagaaagaacagtcaggaggaaatgctttaaaatacagaaaaaaggataatggagaatatatgtcatccataatcccaccataaagagaggattttaaattttttgttgttttgtttgtttgtttgagacagggtcttactctgttgcccaggctggagtgcagtggtgcgatcatagctcactgcagccttgacctcctgggctcaagcaatcctccctcctcggcctcctgagtagctgggattatgggtgcacaccaccacacccggctaatcttttgtggtttttgtagagacagagttctgtcatgttgcccaggttggtcttgaactcctgagctcaagtgatcctcccaccttagcctcccaaccaaagtgctgggattacagagtaagccactgtgctcagcctgtatttttaatatgtagtgcatgtccttacatttttcaggtgtgtgcgtgtatacatatatacatacatgcattatatatattgtatatacacatatccacagacacgtattttaagatgcagaaaaacgggggagacactgaggagatttaaacatgggtgtggcatgattcaaatttcatatcattctggcagttagtgtggagacagatataggggcagcccctggtggcagggaccagtgggcaggtcacccagggcttgatccctgacatccagtcgtgtgacgattgtgtcctgagttcagggaagggctgttgatgaagcagaagaaatgtttgagaagcactggaaaaatccggagccacctgttttgcgatggattatctgttgcagatagtggtgaaaaaaaaaagcaaacaggtggttctgggatccccccgaaagggaaacccaagatgaggagctggtgggaaggggaaattaaatgctcatttaacttaacatgtgggatgtccagaggtgtatttgccatcaggggaatacctgcgtaagggctctggaatagacacctgacttggctatcatttctagcggggttagatagcccctcaaaagacagagtgtggagagaagagccacatgtcaggcttaggtccaagaggggcgagtttgcagaaggagtgatggcaggagagcggggaaccaggggcatcccaagtttggacagaagcaatgtgaatggacacgaaaggagagattcgagtgagatttacacgttagaatccctggaaccaggtgactgatcagggctgggagaacaaagggaggcaggtggagatgaacccaagggctgatctccacgttcccaacagatgtcacgggaggatacagaacacttgtccctgggatatggactgcagtgtccctgcagtactaaacagaccattggtatgtgggagcgagatgcccaccattgttacctggctgaagagctggtcccctttcacacctggctcctgcctcccaccactgcccatcttcttagacacaggcgccgggggactctgcaagcctttcacacctggctcctacctcctaccactgcccatcttcttagacacaggcgctgggggactctggaagcctttcacacctggctcctgcctcccaccactgcccatcttcttagacacaggcgccgggggactctgcaagcctttcacacctggctcctgcctcctaccactgcccatcttcttagacacaggcgccaggggactctgcaagcctttcacacctggctcctgcctcccaccactgcccatcttcttagacacaggcgccgggagactctgcaagcctttcacacctggctcctgcctcccaccactgcccgatcttcttagacacaggcgccgggagactctgcaagcctttcacacctggctcctgcctcccaccactgcccgatcttcttagacacaggcgccgggagactgcaagcctttcacacctggctcctgcctcccaccactgcccgatcttcttagacacaggcgccgggagactctgcaagcctttcacacctggctcctgcctcctaccactgcccatcttcttagacacaggtgctgggggattctgcaagcctttcgcaggttcccaggactcagctcccacccgcctcttggtgctataacagggtagtgagggggtgtggtttcagcacaaccaagcttatctcttctgtgagccttttctgggccaccaatagagtcttccataaatactgagcactgactacgtatcaggtctcgtgtgggcacaagggacactgagaggaaatggagtccttgtccttgaaggtctcaccttccagtgtgggggtgacggacacgccttccagtgtgggggtgacggacacgccttccagtgtgggtgttgacagacacaccttccagtgtggggggtgacagagacgccttccagtgtgggggtgacggacacaccttccagtgtgggggggtgacagacacaccttccagtgtggggagtgacagacacactttccagtgtagggggtgacagacacgccttccagtgtggggggtgaccgacacgccttccggtgtagggggtaacagacacacaaacacacttgctgtggtttttgaagatgatcacaacactctcccatctgatctgttcaaatgtgtcaggtcctcatcaagaggtggagttggatttccatccccttgcatctgggcagggctgtgacttgcttgtctccaacagaaagtggcagaagggacattgcgtgactcctgaggctaggtcagaaaagacgacacaacctcccccttaagtgcacgaaggcctcagttcccctcagctgtcccattgtccagaggctgccatgttgtgagggagccccacctagcccacgacacacggagaggacctgagacagcatgagaagagagagctggtgggtgggccccagctgtttcagtcacctggagatccagctctagtcagcacagaagagaccctgagcctaaccacccagctgagcccaccaccgatttcctgacccacagagatactaaaagcactgttgttctgagtcactgagttttggggtgatgtgttatacagctacagataactggaacagcattgtgtcttcccaccctgtacttattttattaattttttttttaaaatagagatgaggtcttaccatgttgcccaggctggtctgagcaacatggtagaaccatgaacttctgagctcaagcaatccaccagcctcggactcccaaagtgctgggattacagatgtgagctaccgcgcctggctgcaccctgtaattctgatcttaccctcttcttacctggaccctcgtacgatttccctgggatctcagtctctagaattcaatcagccttttctttgggatttggttcctgttcatgcctctcgtttacccgttctgtcctctctgccccttttgtttattgagaggcacttgtgagatctatggaggtatgcttgtggcgtgtgtactaaaaattttagtggcagaaaattcatgtgtttgagtagctaaaaatggattttaagggagtttcatactcaggatttgtgtgcatgccaagcagcttatctgaaagtaaatgaaaaagttgaccgggcacggtggcccacgcctgtcatcccagcactttgggaggccaaggcaggtgaactgcttgagttcaggagtttaagattagcctgggcaatgtaacgaaaccccatctctacaaaaaatataaaaattagctgggcatggtggcacttgactgtggtcccagctactcagcaggctgaggtggaggctagtttaagccagggaagtcgaggctgcaaatgagctgtgatcgtgcccttgcacgccagcctgggtgacagagcgagaccttgttttaaaaaaataaaaattaaaaaattgttaaatgctataaaaaatgtttttaaaaagaaaaaagttaataaaaataacaatgaaacaatatcggcaaggagaacaccactaacttcaggtttgagcctctgctctcaactagcaaaacttttctaagctctgtaatatctaccaaccatggacatattagagaatattttgggaaatatatagattttgttttagtaattaaatatttttttacttttttttttttttttttggagacagtttcactcttgttgcccaggctggagtgcaatggtgcgatctcggctcactgcaacctccgcttccagggttcaagcaattctcctgccttagccttcctagtagctgggattacaggcatgtgccaccacgcccggctagttatgtatttttagtagagatggggtttctccatgttggtcaggctggtctcgaactctcgacctcaggtgatccgcccgcctcggcctcccaaagtgctgggattccaggcatgagccaccgcgcctgggcttttttttacatttttttaatttcttttttcttttttttccctctggtgttgaaactaatataattacatattttaatgtgcagtaaaatatcagtaggacaaaaatctgcaattttattgtatttaggtattgcttaggataaagctacagtgaccatctaagtaaacaagttaatatgtttgaggaaaatcaatcaataaaaagtaatactaaggatacacatggaattgacaaaaaactaggaggtggtactttcttgagagaagcttgggaagccctgagctagaagatatttttcttttaatttataaacatttggagagcactcttttttgtaaaaattacctcacttaaactccacaaccaactgcaagaaactgttacactcattttatagaaatggaaaatgtggctgggcgtggtggctcatgtctgtaatcccaacactttgggaggccgaggcgggtggatcatctgaggtcaggagttcaagaccagcctggccaacatggtgaaaccccatctctactaaaaatacaaaaattagccaggtgtggtggcaggcacctgtaatcccagctacttgggaggctgaggcaggagaatctcttgaacttgggaggcggaggttgcagtgagctgagattgtgccactgcactccagcctgggtgacagagcaagactctcaaaaaaaaaaaagaaaaaaataaaatgtagggagcttaagtgacagagacaggaattaagtccaaagcctggctgatggccaaattgatgttgtctacaggatatggtactgatctcccagtggtagctcaggggctgtgacattcctagaacaggcatctaatctgcctccattaatcatggaggacttcctgaaggaagtgacatctgagctgggactttcccttagctcagggacatctttctcccaagcatggcccccactggtgaatgaaacctaattttctttagagagaaccctgttatctgtccagtattccccagaagaggctggataaagcacagatagctgcctgacttgaaagtgtctttcaggactggatcagatccaggagcaaattgagagagagagggagagagagagggagacagagagagagaatcaaaatacaactgaaaagtgtattaggggagaaaaaggggagaaaaagagattatttcttcagactaatatcctgtttggaaacaccaaaaactgatattattgaaaatttcacatgtaaaataaagagcttaaataacaattcaagtctaaagtttggctatcacaatttttctttatttttgtttgtttattgaggtataacttacatatagtgaagtgtacaattcttaaggttacagtttaataaatttttacatatggatagacggatagattcacataactatgacccagataagaagacacaatatttccagtacctcagaagtctccctcttgcccctccaatctgtgcctacctacaggtaaccacttttctaactttttttttgagatggagtctcactctgttgcccaggctggagtgcaatctcagctctctgcaacctctgcctccctcccaggttcaagtgattctcctgactcagcgtcctgagtagctggggttacaggcgcctgccaccatgatcggctaatttttgtattttttagtagagacaaggtttcaccatgttggccaggttggtctggaactcctggcctcaagtgatccacccgcctcagcctcccaaagtgctaggattacaggcatgagccaccgtgcccggcccacttttctaacttctatcaccataaattaattttgactattttagagtttcataaaagttgtatgttacagtatgcagtctcgtttctaatttttttttttttgtttttttgtttttttgagacggagttttgctcctgttgcccaggctggcgtgcaatggcatgatcttggctcactgcaacctctgcctcctgggttcaagcaattctcctgcctcagcctcccagtatcccaagtaactggcattacaggcacccaccaccatgcccggctaatttttttgtgtctttagtagagacggggtttcaccatgttagccacactggtctcgaactcctgacctcaagtaatccacccaccacagcctcccaaaatgctgagattacaggcatgagccactgcgcccggccctgattttcattcaacattatattgataaaagtcatccatgtggttgtatgtatcgatagttcatcctttttattgctgtgcaatattccattgatttatttatccattccttgatttatttatccattctattgttgacggacacttggattatttccaacgtttatctatatgggtaattatgctgtaagtcgttttgcatatgtcttttggtagaaacaatacttttttaaaaacaaatttagtagattataaattccttagtgatgggtaaggtaggagtatgtattactgaacatagagacacttggtagagactcctcacatgcacatctgaatgatgccttgggactaggcagtgatcctttgcccttcttggggccaggcatacctccaatgacttggtaacagcttcaactcttcttccaagaagattgcccacatactcaacatttagcattgggcttctggaatgtggtgatatctaaggttcttccagctttggcctacatgagacggtgagctgggtgaagtgcattttaagggcaagcgctgagctccagcttatgaggaatagccctccaatgtgccaggaacatgttatgtgccctctggaacaaataatatttcacttttccgaaagccagagctttgggatcccagatctagtaagaatcatcttattcatcttcctttcatctccaagccagaaggaggctcgttgaatttacagggatggagttgcaaagggcattaaggaatcctgcatctatgctatcaggacctaccagtcccaagtggctttgatagataaaatgttctgagtgccttaacccagaaaaactgcaactctagaccctggatgttctaaacgacgcaatcagaacatcttcccatattctttggaagaaactctaacactttcctctttctacttctacctaaaacatctgaaagaagggaggcgagagaggagagaattatgcatttaaacaaagacaaggaattgcgaaaatcaccatttttaaagaagtatagatttcataagaacctctgagatgatgataatgcatgataataacatgtaataacaataattataatagtattatgcttctatgagccatataaatattatatgctatacatattgctaagtgttttacaaccttcacctcatttatttccccctaaaagtctatgattttatgtaagaggaaaatgaagctccaagaaaaactttttttttttttttgagatggaatctcgttctgtcacccatgctggagtgcaatggcatgatcttggctcactgcaacagcactatcttggctcactgcaacctccgcctcccaggttcaagcaactctcctgcctcagcctcctgagtagctgggattgcaggcacccgccacctcacccagcttaattttttgtatttttagtagagatggggtttcaccatgttggccaggctggtctcgaactcctgacctcaagtgatccacctgcctcaacctgccagtgttgggattacaggcatgagccagcacacccagcccaagaaagactttttggacactatctcagggtaagggagtagcaggattgggatttacacctggatctgactctcaagctcatgctcattccactacagaaaatgacctgtttgttcaggtcttcctattaactgagatcttccatcttccaggaatgatgcagtacattccaagaaagatgtgttatggaagtgacatcagatctgaatcctgaagtcaaagtttcatttagtagaaatcaaggtaagatgaggaagtgttgggagactggactatgaagtatgaagagtctgtatcagaggctggcaaactatagttgaccatttgtttttataaataaagttctattggaacatagctagctccccttgcttatgtattgtctctggtggctttctcactacagtggcaaagttgagtaattgcgacagggaccatatggctaacaaagacaaaaatagttactatcttgctcttgacagaaaaagttttcctactcttgatctaggtcacac[133 bp omitted]gaaaccccgtatctactacaaatacaaaaattagccaggtgtggtggcaggcgcctgtaatcccagctactcgggaggctgaggcaggagaactgcttgaacctgggaggcggaggttgcagtgagctgagatcacaccactgcactccagcccgggtgacagagtgagactccatctcaaaaataaataaataaattaaataaatgcttatcctgtatgtaatgttgagccatggaaggatttggagtaggggagacacatgggcttatttcagaattacaaaaaaaccattctcagatccatcctagcacagggcactcccatgataaaggcatcaacaacacaattccaaaccatcttcacttctcaatctttcaccttgaataccatttcaacaaatattaattgagcatctagtatgcacctatactctatgtaagtggttaaagctgtaagcaagcagtaaggcttgaaacttaaagctggtggaaagtaaactgaggaagtgagctttctctttgagagatccaatggaaggaagactatgtacagaaggacagcagccagaggttgccttagaacacaaacagagctgaacttcttgaatcaagcaggttttttgggttccagtggcagaaacggactttggctagcttaaaagagaaatcactggaaggaactggcaaaggggtggagttcaaaggattaaagtgaaggctggagagtgggtttgggaaagagtgaagcctgggaaaccaagagatttctgtatcatgagccactcaacactctcacctgaaaagcattaaatctgcttcttccactcttgctttactcaattcgagatttaaagtgccaggtaagcagtctgattagcctggcttaggacaaaggttggttggctttagtgtaaaaataaggatctggtgcaaggagctttgagggaccctgcttgcttttcattatgagaaaatgggcacgtgcattaactatcccaccaggaccacatacagtggagcagaggtaattcttccaaaggaaatcagggtatagagacttagcagctaaacaagttcacaaatgtcaatcatacctgtatagattcaaatcctacctcttccaattattggctttgttgactttgggcaaagttatctcatttgcaaagagaaattataatactacccagctcttaaaattatgagctaatagatatgaagtgcttagaaccacgtctggcacatcataatcacccaattaagcttaactgctgagagtattatgattattactgcatgcttgctaaaaatagcaccaagtgatagagcccacggtgagatctaggccctcattccaaagctcccgctctttctgccaagccaagctgcctttgcagatccaacctcagttaaatgagatgataatgtgtgtgaagttgttggggcaggtgcccaaagaggatgctcaattactgtccaagactttcttcctctctccccaaagaagtgagtaggcttaggctttgctttctgcttgggagatgcccccacttttttttttttttttttttttgagatggagtctcactctgtcactgaggctggagagcagtggcgcgatctcggtgcctggttcaagcaattcttctgcctcagcctcccgagtagctaggactacaggcacctgccaccatg[180 bp omitted]gagggcccagggaaagcagacaaagaggaatgttcctggtttgtgcttactatcattctcacggcggagcccactcaggtttgttgacaatctggcccctgcctaccactctaacctctcctccctccacattcccatgagcttaccctgctccatccacaatgatcttctttctgcgtgtcaaattccttctgcttttttctgcctcggggtctttgcacaagctgttccctctgtctaagctactcttaccccagatcttcattaggatctaaactcaaatgtgaccatctcagtgaggtctctcctgacaactctagctacggcagcatctcaaccccatcggtctctaacacatggccctatttcagtttctttgcagcaatgaccagtacatgaaattatatatgtgtttgtcaatattgttgtttgtcttcctacaccagactataaactccacagggttagagaaagtgcatccccaacaccgagactgcttggttcacagagggtgcttttacacatatggctctgtcagaactgtcatagcaaccctgttaggtatatagtctattaaggctgagaggcgcttagtatcatgatttagagcagcactgtccaatatatgtagctatttagatttaccacgtagctatttagatttacatgcttcataatgaaataaaatgaaaacttcatttccttagttgcattagcgtcacctcaagtgctcagcagccgcacgtggctagtggccaccattctgggtagcacggatacaggacattcctatcactgcagaaagttctactggacagggctggtttagagcattcactgcagattcatatacttagcttcgaatcccagtcctgccaattactagtggtgtgattctgagtggaccttatgcttttagatctcacttttttcatctataaaatgacgctaataacagttcccatctcatagtgttgtaggagttattataggcaaaggctcttagaagagcatctgggatgtagtcagtgctagaaaaagtatcgactgttgctatgacacctccatttttactccctgagaaactgaggtccaaagaaaagaaatccttgtcctagtgcacacagccaggaggtggagggagctgaggtttgatcccgcacctctatgatttcagagcctggctaaatccgatgacacttttcaggtcccttctgggaaaaatccctgaaacttctgacccattgctcccttatctgtttagtgggggacagaagactccaagggctcctctatctaggatagatgtgaaggaactgactggagagccagccagagcccaggacatgggttgtctattctaggacctagtcagtggcttgggactccttgggggttgggaagccaggctgcccaggacacagaagcattggtgtggctgagccagtcatgccagctgcagccgagaccccttgtgtgggcgctgcccctgtgggtgtaatggcccctgcggcagggacagaatgctcatccctcccacctgctcaagctctgggactgccccaggaactgtacagaggggttgaactatttccacttgtttccctgtagaagcctcagatgctgctgctgctgctgctggtttaatttttaaatttagttacttttaatactttttaaatttagttacttttaatatgcacagtccctatgcttgtactgttttctttgttttgttttggtaacatgggatttttaattgctatttttagagcttttaacacatttttctacatttaaaacttttttaattgaggtaaaattcatatgatataaaattaaccattttaagtgtacaattcagtggcctttagtgcattctcgatgttgttcaaccgtcacccacatctagttttaaaacactttccttacccctcaccccatctcactaagcagccattcctctttccctccccattcctagtccccgacaaccactatctactttctgtctctaaggatttacttgttctggatattacgtatcaatggaatcatacactaggtagtcttttgtgtctggctgcttttactttgcataatattttcaaggttcacccatgttctagcatgtatcagtacttgatttctttttacagttgaataatatcctattatatggctataccacactttacccattaatctattgatggacattcgaatcatttccatattttgactctagtgaatagtgtcgctgtgaacattcgtgtgtgaatatttgtgtaattacctgttttccgtgctttcgggtacatacctaggagtggactttcagggttatacggtagccctatatttaactttttgagaaactgccaaactatcttctacaggggctataccaatttacatttccaccagcaatgtataagagctccaatttctccacatcccctcaatatactttaaaacattcacaattatatggcataataatataataattaatgataataattgttgctatcattaataggaggaaaccgaggctcagggatatagtcaattgagcaagtttatgcatctgtgaggcaggcagaataattgtccctgaagatacccacatctgactcctggaacctgggagtgtgttactctcagatgtgataaaaataagactgttaatcagctgaccttgtggggagattatcctggattactggggtaggtccaatgtaatcacaaaggatcttgtaagtgaaagagggagggaaatgggtaacagagggagacggaatgatgaaaacagagaatcagagcaatgtacggtgagaaagacttgaccggccatcgctggcctgaaaatgggagagggttggagagagatttgaagacgccatgctgttggttaggaagatgaaagaggccgaccaggagtcaggaatgtgggcagcctgtagaagctgcagaaggcaaggaaacaaattcctcctagagccggcagaaggaatgtagctttaccaaggcttttcactctatcaacccatttcagacttctcaattccagaactgtatgataataaatctatgtcgtcttaagtcacaaattttatggtaatttgttatggtagcaagaagaaactcaggccagccgtagtgtggtggggcagggattggcatccacactggattgactcaatgtctgtgattctaactgattggctgtctgtgactataacaaccaggttttttgccgtctccaggtccagcaccacttccctgctccacatagacatgagtggatctcacaaacatcacgctgggtgaaaaaaaaaaaaaagatcccagcactatgggaggccgaggtgggtggatcacgaggtcaggagttcgagaccagcctggccaacatggtgaaaccctgtctctactaaaaatacaaaaattagccaggtgtggtggcgcacgcctgtaatcccagctactcaggaggctgaggcaggagaatcgtttgaacccaggaggcggaggcttgcagtgagttgaaatcgtgccattgcaatccagcctgggcgacagggtgagaccccgtctcaataaataaataaataaatacatacatagctagcaagttgtgcaagaaagattcagtgaaacaccatttagaataaatgtaaaaacacacaaaataatattacatacgtgtactggagccagcttatgagggtcaattgttaacgttttcagttttctacatttaaaacatttttaaattgaggtaaaattcctcattttagctgcttgcctaacatagcccaatactcaaaactaaattgtataaacttgaacataaataagttataataaaaatagagtaataagcactaaaagctcatcacttcctagttgtggctccccaaacatggtggcggtggtggttggtgtggggtgggtggggcaggtgctactgtgtaattgatagggaccagagatgttgctaaatatcccacaaagcggaagacagcccccaccacaaaaacgatctagtcctaaatgtcagctgtgccaatggtgagaaatcctgatcttccctaaagcatgagttcctcatgagcaaggccagtatctgactcatctctgtccccagatcacagtctggcagagcagataatgctaaagaatattaatgatgttctacatcccaggcatttgttgcatttaaaccctagtgttatgagttagggactgtgattatatttgataaagcaaagaaacagctgtgctggtaatgaggctgctaaggaaggatggaaaatcgaaacgtaggactaatcagagaaatccaaatatgctcccccaaccaatcacaatggcctctaattaaccactgccagcttccttatgccaacggcctccaaccaggcactcttgaagccttccctttctttcactataagctttcccactaccctgcctgcctttgagtctgtgccaaacacaaatggtgtcagtggcctcccttattacagcaagctctgaattaatagcctttgcttgttttcattgggtggtctttacttccgcatagcaccggatgtgaaaagccttccacatgttttacgccttgtttcttctgctcattataacaaatcctgtagtatcacgttttcccggtgatgagttgccaggaccatgtgctcacaaaggaggggagctctgaaatatggcaaatggccaacaagaactctctcctccagcctagtctgaaggatcgctgaggtatcccctaatgtacatgagatggtccagcttgtactagggattgaaacatagatagcaccagagatggcggcaggagagagtcccctgcaagagtggacatccctccacacctggaactctttccttccaggacactacacacaaccctctgtttctatcaggcttgaaggaagtaccatagaaaccttcagagcttagatagaccagtggtctctacactctgcctttattccaggagtccagagggatactgggtcaagttcatattcccactgacagctaaagttcttgactgtcaaagcaatttctaagaattaccagtggaaacagttagttccctgtggctgctatgaaaaattattacaaacttaatggctacaacagtacaaatttactatcatacaggtgtgatatgatagtatcacattagcctggaaatatcattatcccaactttatagatcaagaaaatgaagcacagagtggttaagtaacttgctcagggtacatagctagtaagtgctagaggtaagtataaacgtagacatctttggaaaggaatatacacaaaaatgtaaaaacaatacttacttctgagtagaaatacgatagatgttgtttgcttgctttgttgtttttctgaaatttacagtacgtctaggacaggggtccacaaacgttttctataaagggccggacagtaaatattttaggccttttggcccagatggtctctgtcacaactacaaagctcagtcttgcagcctgaaagctgctgtagacaatacatagtgaaatggcatggctgtgttccaataacactttattcatggacactgaaattcacattctatataatcttcatgtcatgaaatattttcttttgttttttccctccaaccattaaaaaaggtaacaattactcttagctcataggccctacaaaaacaggaggagggcaggatttggccagcagatcataggatgacaagcatcacactcagcatgaaactgttctaaaatgttgctttaagatgaaaaagcagatacagttctttggtcagcagttggtggcgtgggcacaggtctggagacctgccagcctccaggcaggctagagggcaggtgtgggcagttagttttgtccctggagcctgggaagacggtgggtgaccagagagtcctgtctatcctaggaggagaacattcagcccaaatcccagccccatcatgcacagatcagagccatttctgaaaatgtcgctgctgattctgcttttcctgggattggcagaagcctgtactcctcgtgaaggtaatgcttccagccatgccttgtgtcctctatgtattttcttacaacttgggaggctcttgtgggctggattcagagagaagctcctgaagtctaacagacttcttcttgcttcccatttagacattcacatttcccttgatggacacagtggggtgaatgagtctaggttgctagcccctgcccttggagatacacttgtgtctgcatcctggtttctatcactgattctgtgactttggggagacactgcgtctgcaaaccttgctgtcctcatctgaccaacggggctcacaagaatccccagttcatgggactgttgcatgtcattgacgagcttacgttgtgcagtgcctggaagtcaacattaccatagttagataattctagtgagactccagacttttgcgacgtaaagacaccaaagagtatattgggaagaggacttgggtcttgccataactctgagttcccatttcctcattcgatccacaaatgtttattcctggttctttccacgggcttgatgctgggaatatagtgatgaaaatagttctgtcttcatggaattctcatgctaaacacacacattctagtgtggggattcggagatggcctctctagaaaagtcacatttgaggtaaggaataggagctggccagctgaagagttaggagagactattccaggcagagacttgaatatgcaaaggtcctggggcagaaggcactgagtccctccatcagagagaggccggtgtgtcaggaacgtggtaggcagaaggaggggcatggtggtgagactgttacaagtaagaagagacaggaggcaggaaacagaacagacgggggcatgtgagtcacaggaaaaatgttggatgttatcctcagggaaaaggaagctgtgaaagggttttcagcaaaggagtgtcatatttaggagcgtgtgtgtgcatgtatgtgtgtttctgtgtgtttaaacaatgtgtcttgccctcaggaaagaatggattaggtgggaatcagattaggggcaaacacacaagttagaaaacgttttggtcatcagggtgaagatggggataagtagaaggttacgaggcactgaggaaacagctcacaggattgagtgatgggtcagatgctggtggttggggatagagaagcatgcagaaaggctctctttatacatacatgtatttgcaactggggaattgaggctgcccttaactgagatgagaaaactctgtagaggtcgggcgcggtggctcacacctgtaatcccagcactttgggaagccaaggcagctggattatttgaggtcagaagctcaagaccagcctggccaacatggcgaaaccccatctctactaaaaatacaaaaattatccaggcatggtagtaggggcctgtaatcccagctactcaggaagctgaggcaggaaaatcgcttgaactcaggaggtggaggttgcagtgagccgagatcctgccattgcactccagcctgggaaacagagcaagactctgtttcaaaaagaaaaaaagaaaaaaaaaaaaactctgtagaggaacacgttttttaaaaaatttattttgaaattattttagacttgaggaaaagtcacaaaaattaagtttctgaatattcttcacccagttatctcagctgttaacatcttacctaaccatagcacaatgactaaaagcaagacccaacaccagaacaaaactattaaagaaattacagacctcattcaaattttactaatgtttctactaatagaaaaactattctatttgaggatccaatccaggatcccaccttgtattttcaattaagttttttgttttgttttgttttgttttgtttcagaaaatccagctcttgctcaaccatgttgcattttgttatcccatctcctttggtcttgtgatttgtccttaggatgtgtgattgaacctcctcaatctttgtctttcacgaccctgaaacatttgaagagctctgatcagttgttttgcagaatttctctcaatttgggtttgtctgaagctttctcatgattggattgagactatgcatttagggcaggaataccacagaagtggtctcacacccttccccgggaattatatcagggaccacatgatgttgatgtgtcttattacccatggtgtaaactttagtccctcggctaaggtggtgtctgccaggtttctccactgttaagttactattttccccctttgtaattaataaatacgctgggggagaaattttgaggctatgcgaataccctgttctcctccaatttttgcccattaattttagcatccatctgtggatcttgctgcagaaatgattgctacagtgcttctccaatggtgattttctattccccttattcatctacatatattcaatggcctttctctgtaaggaaaagctgacttttcttctccatttatttattcaagtactgtatttatttatatcagcgtgaactcagggatatttatcgtattggttgggtgcagtggctcaagcctttaatcccagcacttcgggaggccaacgcaagaggatcacttgaggccaggagtttgagaccagcctgggcaacatagtgagactcatctctacaaaaaatagtaagaataaataaaaagtattgcattaacagattattttttgatggataggagtgtgatgaccacagattcttttttgaacaggctaagcttgaagcacctgtaagatgtttgggacatccatagatagcaagttctgtgagaacagagtttggggtgtctagtgtactcttataccagaacttctcttcccaatcagccttgcaaatacctacagagcaggggctgaatctgatttatctgcgtctccaacaccaaacatgggccaatgcccagagcatgtaccatgtgaatgttggttggatggatgatgaacgaatggacttatcgatggatggatgggctgatagatgggcccgagtagctttattgatagcagtgagtgggtcagctgatctccagggacacttctatctctggtcttcttggttattgcactgatctgagtctaatgctaatttctctctctgctccctgctcccgttgtgaactggctggctgatgcttttgtctccagttgcaactaaagaaaaaagtaagaaccgtggaacccccaagtctgtattttcatagctacctctcctaaaattcttttcgatcttgcaacctctctggcaattctggggaagggtggcacttggatctggtgcacagacctgccatggggtctggacatgactcagaaaagcaaacctattgtttgcttacagtgatgctcacaactaaaagagcagccctccttcactcctttgtctggggaagagaggcctattcggaaaatgaagagcatttatcagggaagagagacttcgggcagatctccattagaataacaccttggcttatgtttaacaccagctggtggtttgcaaacttcatggtcttagggccactgaacacgcgaaaaaaattattaaggatctaaagagctctttttttttttttccagtgagggttatttttatttatttatttatttttgagacgagcctcgctctgtcgcccaggctggagtgtagtggtgcgatctgggttcactgcaacctctgcctcctgggttcaagcgattctcctgcctcagcctcccgagtagctgggactacaggctgcgcgccaccatgcccggctaattttgtattttcagtatagacggggtttca[131 bp omitted]ttgtaaattcaaggatttttaacttaaaaatatttatatttacaaatattataaatatttacaaatacaaatacttatatttacaaaaactatttctatttacaaataagcacataaaaagatgctcaacctcattagccatcagaaaaatggaagccaaagccacagtgaggtatcacttcacactaactaacgtggagaaatcagaaccctcatatgctgctggtgggaatgtgaaatgatacagctgctttggaaaacagtctggctgttcctcaaaatgttaaacactgagttactcagcaattccgctctaggtatgtgcccaagataaatgaaacgtaagtccacacaaaaacccatgcacaaatgttcacagcagcactattcctaagagctagcaagtgaaggtaatcctagcatgcatccattaatgaatggagaaacagagtgtggtctatgcatacaatggaatattattcacccataaaaagaaacaaagttctgatgcattcaacatcgtgtgtgagccttgaaaacattattctcagtgaaagatgccagtgataaaagatcacatattacctgattccgtttaccgtatatgaaatattcaggataggcaaatccatagagacacaatggacattagtgatttccagggggtgaggggtgggggaatttagagacaatgactaaggggttcagggtttattttggggtgattaaagcctctaaaactggtgtagtgatggtcgtacaagtctgagtatcctacaaaccactgaaatgggtgaattgcatggtatgtgaattatatctcagtaaagctattattcaaatatctattactgcattaaaaaaataaggataatagagactcagaaggaaggagggtggcagggaggtgagggatgaaaactaccttttgggtacaatgtacattacaaagatgctggtgcactaaaatcctagacttcaccactgcacaattcatccatgtcaccaaaaaccacttgtacccctaaagctactgaaattaaaaatatttgaaaaataaggataataaatatacatactgacataaataaaatgttttagtgaaatggctgtttccaaaccaaaaaagtttagtaagaaaggtattattttacatttttgcaaatctctttgatgtctagtttaatagaaaacagctgaattctcatttctgcttcagtctgtcacaatgtgctattttttttttttttagctttatgtgtttgtttattttggagacgtagtcttgctctgtcgcccaggctggaatacagtggcacggtctcggctcgccatgacatctgcctcctgggttcaagcaattatcttgcctcagcatccgaagtagcctcccaagtagctgggactataggtgcatgccaccatgcctggctaatttttgtatatttaggagagacaaggtttcaccatgtt[132 bp omitted]atctcacacagataaggagttggaaaagggaagatcatgcagacccgttttaggcagagttctccagagagacagaaccatgaagatatacatatagatacatatatagataaagatattgatagagatatttgagaacaaatttcttaggggaattagctcactcagttgtggggtctgcaagctgcagaaccaggagggccagtagtgtggctcagtccaagtctgaaggcctcagaaccaaggaagctgatggatggtctaactaactctcagtctgaggccaatggcctgggagctcagggagctgttggttcaagtcctagaatcccaaaagctggagtacctggagttctgacatccaaagccaggagaagggcatcccagctgcagaagggagagcaagaattgacccttactccacctcttggcttcagctgggcctccatccaactggatggtgctcacccaccgtgagggtggatcttccctacctagtcttccaactcacaccccaatatcctccagaaacaccttcacagacacacctggggcagcccaaacattctaatcaaatgccaaaccactcaggcttccctttcagcagaagacggatggactcagtgcctactgaagcattgagaataaacgtcttactgctatatgggtgccttagtcaagctgacaccccaaatcaaccatcacatcccctgaaaggatctcagggaccacctcccacccccaccaagtagtctttggatgatacttcgagaatttctgctccaagtcacatggaagggaaaaagatctcttttttttccacccctactagactgcaagactgtaagttcctagagggcagggactgtactttactcaatctgtttattcctatagcctagcaaaattcctagcgctcagtaggactaaataaatggaaagagccttgcaaaatggaaaggactgtgagaacataatttaatgctattatttcaggttgaaaggagataaaaggatccaatattaattaagcatttagcatgtactgagaatttaaaatacgtcatgcaatttaattttcaaaatcgtaagtgtcccatatggggtctgaggtttccaaagctctgaatcctcacactggaccatcatcatgagaatcacatgggaaactttaaaaatatttaatccccacaccagacttggtgagctaaaatgcctgcagataacattttgggttttttatacctaaaaagctagcctatgttagttccttcctatcttcaaaagctgaaccttctaaacctaaacaaatgcaaacatctcatgatccacactgtttttgtttcaatttaaaatattatgctgttttaattaaaatgttttatgttaaattattttattaatatttcaattaacaaaacagtatttacataaactttaattacatttaaattactaattaattattcaatttaaaacatcatgttattttcatttaaaataagatttccagggttcagaattaaagaagttctcaaggttatactggaaaaaactccttcccaacctattcactcatttcccttccccgaaagaatctgatattaattatttcttccagatccttccagagatattttatgcaagtagaaacaaatgtgtatttatatattcaaagtcctcttgtttctatttttacaaaaaagacagcgtattatacacactgttctgtatgcaccttacttttttcacctaataatacttccagaagatgactctgtgtcagttcataaggagcatcctcaacctcttatttatacgtttttggctgaataatatttcttgtatggaagtccacaatttgtttgaccagtcacatactaatggccactcaggttgttttcagtagtttgctcttttaaataatccttcaaagaaaaattcagcttacatgaaattagacatataggatatatatcaatgtagatctacatatttatatctgtaggattatacatggaaatatgtagaattatatctatatatagatatatatttctttatcatctagatataaccactgtcgtagtctgttttgggctgccataacagaatacctgagactggataatttataatgaatagaaatttattggctcatgtttctggaggctgagaagtccaagattgaggggttggcatcttgtgagagccttcctgttgtgtcatcctatgatcaaaggacagagagagagacagaaacagagacagagagctcagagcttcaagcccttttataaccagcatttatctattcatgaaagttgagcccttgtgacctaaatacctcccattaggccccacctcccaacactgctgcatttgggattaagtttccaacacatgctgtttggggtacacactcaaaccataacacatacacatttgacccttgaacaatgtgagagttaggggcaccaacctccagtgcagttgaaaattcacatataacttttgacttccccaaaacttaactacgaatagcctactgttgaccagaagacttactaataacataaacagtagattaacatatattttgtatgttacatatattacatgctgattcttacaataagggaagctagagaaaagaaaatgttattaagaaagagaaaatatgtttactcttcattaagtggaagtggatcattatcaaggtcttcatccttgtcatcttcacaatgagtaggctgaccagaagaaggaaggggaggggttggtctttctgtctcaggggtggcagaggcagaagaaaatgcacatctaagtggataagtgtaaccatgtagttcaaacctgtattgttcaagggtcaacggtgtgtgtatgtacacatatacatttacatatttatataaatatatatctgtaagattaatttctgaaactgcaaagttaaagaagggtttctaacactcgtgccactacaatgctatcgctgtattgatctttgtcaaatttatgtgacaaactacataaaaatagcgtcccatataaagatcgcactccatataacaacaggcaaataaatgttccatgaaggaataaagaaatgcatgtaaaaattaacagagatggatgatgttaatattaattccactctcttccttgaattttccatgttgattcactggctcctggctctgctgccccttccagtcaactgtaagtcatatctccttctccctacataaatggggagcccgcccttcaacctagagaaggaagggaatgaaagagagaggcaaaactgctgacgatcacattcaacctggggcagattcagatgtcctcaattcaaacatgacctcttcacccagaatctgcagattgcccggggtgggaacggtgcaactggatggactttgaggaggccaacaagcctctgtcattaggtctaaaactgggtgtgctgtcagagagaaagagaacctgtgtggtgttctgggaaatagctttgatcagattttcagtaggatcaatgacctaccacaatctaggggcctttgctctagaatgtacacctgggttagattgtgtgtatttattggtgggttttagatgagaaaaatatggtacagggtgggtaagacgtcttcctttcccagaattaacatccagtctccggttgagaagtggagatgacacttggttattatggagaccttccttatgctagaaattcagctggagaagggagggtctggattccccaggccactggtacccctgaagtttctgacttcagggtaaatgtgcctccaaaggggtccaatgcacttagaatgaattgcagctccccattctggttccctaacctatctcaggacctatggggtgcaatgaggtaccaaggatgacttaattcctttcatattctctctgaaccttcattggcaatatggttcccactggctaccatcggtcctgtccttcctgctgcttgtctgccaacagtgctgaaaggtaagcttctcattccatctctttccctttggggtctgtttgcctttgtccaaaagggatcattgctgctgaacttcgacttacgtttcttctctggtctgttcacagcttagcttctaatagcggaactagtaaaaccaagtgtggaattgtcctttgatgaacaacaacaacaacaaaagcccttttacttgtctcccctcaaagccacttgtccagaaactgagcactctttcatggtccgcacatggctcaaggaaagctattaggtctgagagctcaattcaggtctacctgacatcgataataatatttggttagacacaatgacttacatctttgctttctgaggtcaggtagtaaaagccaccatcatcgctgcctatttaataattcctagagatagcaatctggaacaagttaggtggaatgagaccatggctttgtcactgagtttgcaagactctggggcagaaggctaggtcaggaagtgagatgatgacttgcagaaaggggacaaggcccacattaggcacctttgcattcggagcctaattctgctccttcctaggtggggcaatcttagagaagtcacttcacctctctgtgcctactttgcaaggttaagtgaacttacggttgcaaaacattttcaactccataaatccagactttaccacctctttctgattccacgtccctgctcccactgcacacacacacgtacacacccttatgtatgaatccaatactattatcatcattattattattacgtacttcatattactatttctaactttactaaatgttaccttgagccaggagctaggctaagtactcaatctgcattatcttccttctttattgacacagatccaaacaggaaacaatatctccattttaaagagcacagagagttcattcatcatcccaaggccacccacttagtaaaatgtatagcctggatatcagccattcaatgcccacatcaatattcccaacaacgttaggcattaactaccagacgattttcagtgataccgagaaaggtgttgcgagctccataaatacagcactttccactagcaaacccagtgggattcttcaatacgtagcaagcctcgccccagttaacgttcccgttttgcagatgaggaaatggagacttctagaagaagtcagagagatctgagtttgagttcctgctttttcactcaccagctgcacaggtctctgcaaatcacgtaattccttggaggttcacccgtcctcaccagcaacatagggacaatatctgatctcaaagggctggtgtggggtaaatagaaggacagagcttggctcctctttctagaggcaataaaggatcatcttttcttctgttcctagcatgaatgaagaacggttcatgattactgtcccaacctctttctccactttggacgctcttccctgcatcaaatgcacgagggtcctcaataatctcacagcgttctgagtcttagtccctgactgctcaccatgcatgaccccttgtggattctacttcccaatctgttcccagcccccagcatctgacctcgtttttggttttctaattatggcttcgtctttgtgacctcttggggacaacattctggaccacgcatgtaaccttggccaccatgctgactctcctggatgggctgccatcagggatcataggtaagtaccttgccacttcacaatgcccccagactgtgcactttggcgggaaattttgggctttgctctagaatgtacaactgggttagattgtgtgtattcattggtgggttttagatgataaaaatatggtgcaaggattttgtgcaagaatttctgagtatctagtctgtgcctggactcatgcttgggtgatgggagcccagaagtggatctgatatgctcattctttataaactcaaagtctggtgggaaacagagataagtaaacagaaattagattagagacaagtgatgcttgctgtaatttttttttttttttttttttgagacagtcttgctctgtcactcaggctggagtgcagtggcacaattgtaggtcactgcagcctctgcctcccgggttcatgccattctccaacctcagcctcctgagtagctgggattacaggcacccaccaccatgtctgcctaatttttgtatttttagtagaaatgggtttggccatgttgtccaggctggtcttgaactcctgacctcaggtgatccacccacctcagcccccaaagtgctaggattacaggcctgagccactgcgcctggccttgctatgattgatagaggtaggaaaggggattaagtgggaataatgaggcatcatgactgaggcattatagccacacttcctgaagaagagtttgttacatctgttgaactgggagaaatccattaattaggcatatttctttctgctgcatttgcacatcatgtgttatgtcttcttcctcaggtctcatgagcagactgtcaccggatggtaagtgtcaggattgtatcttttaaacctggtctttctcttgtccgcaaggtaatgtagacttattgagtcatttatgcttttaggtagagtctaaagaacacttcaggtattatccaagcacatgttttgtttgaactttgatgtaatgaaaatctttattgctatataaggttacagctagaattttgcctaataattattatgctgtggagttttttaagttttataaatagcatatgcacatgggaaaatatcgaggaaacataaaatgaaagtcaaaatcattctcttcaccacattcccggctctgctctctagaagcaagcaccatttctagtctcacgtgtattctccccagaaatagtcatacacatgtatgtacatccttaactcttcaagttaaaagtactatgtgttttagtgatataactttacctctttcaaatacctgagaaatgcttcgtgtgtactcccataatttaatgagcctctggttcatgtacatttagttttttttctaatatatatgtttttagttgtttcctttcaccccattgactgggattcctaacatattttgatttgttttgtttgttttaatttttaaattattattattatttttgtatttttagtagagacagaatttcactatgtcggccaggctggtctcgaactcctgacctcgtgatccgcccgccttggcctcccaaagtgctgggattacaggcatgagccatcacgcccagcccagttttgttttattttgttttgatgttattataaacagcgctataatggaaatccttatccagtcattgcttttttatttttgcaaattcctatctgttaagttcctaaaagggaaatggctgggtcaaagggtatctgccttttaaatctggacagatgtttaacaaatttgcatcttcatatacagcctgtggggatgcttgtttccccacaccttcagcagcatgggatattatctaactttttatttatttatttagagacggagtctcgctctgttgcccaggctggagtgcagtggtgagatctcagctcattgcaacctccgcctcccgggttcaagcgattctcctgcctcagcctcccgagtagctgggactacaggcgcccaccaccatgctcggctaatttttgtattattagtagagatggggtttcaccatgttggccaggctggtcttgaactcctgaccttgtgatcctcctgcctcggcctcccaaagtgctggaattacaggtgtgagccccgcacctgacccaaactttttatttttgataatgtggtggccaaaaaacactgccccccatatttttttcacagacggactgaaccccaacaggtgttcttgctgcatctatgcaccgccagaacccccacacctcccattcttcaaatggacgtacagctttctccttaagtcaataaacttgaaaaagttgctttataccgcttgagtaagtggtcagcctcataaggaggagacaactgtgaagataaatatcatgaaaacaaaacgagattaaattataactagacactgttttctgccaaggctctttgtgtgaaggttgttcccgctgttcggtggaaataaacactagcaagtgttatgagttaaagatgcgttagtgccattttgagaatttctctctggttgaaagagaattggagagagaaaacctttctcaccatgtggtacccaaggagttcaagctgaatctgtgtccacgtgagatctgctcggcgtcactaagcactcatctctcactgctagagatgcccggcagagcgaatgctagtggggcttcccaatacatccatatctggaatttccacctggctccactatttaccagcacacaccacccaggacaagtctgttttcttcccggtaaaccaggattcacagcacgcactgcacagtgtggttgtgagattatgataaaatgccagaaacactcagatattagggagctggtgaaagtggatttgactccttcccacccccaccattccatggattctggagtctaaagtcttccttgtggtttctgttactcctgtgatgacagtttccgagttttgtccatcttaggtggtgaaaccaccatgcactttctctgttttcccatcaacctggaagtagaactctcctccttgcccatcgacctggaagtagaactctcctccgggggttcccccaagaaatgtgttgtgggaaacattttacggaaacctatgactgagttttgatggagaatgtcaggaacagtcagtccagcctcgagcacatggttcctcaccttaccaactctgctcacctctccttttcttcccttcccgcctctcctccctcccacattgcctgcggagctacacagtcttctccttttaacaagcacaataattcagttctcccccactcccatccccccaagtccacctaacccataaatatcagccctctgtgcaccaggagcttcctccttggaatgcagccggactttataaaaagcaaaatgttcttattccacatgtgaagtgcctgccacgaaaccaagtaccaatcgaatgtagccactgtcaggtataataacggcagggggttgaggcagatgtggaggaagtcacagactcatggggctagaaatcatctgagtcattaaacaggtggggaaactgagggctggaaggaggcagagcatcagaggcaaggtggccactaacagtagattcattcagcaccttaaatcagccaatgaatttccaagtatccctttgcatggattcttttaatccttataagccctctaagaggtgtaaatgccacaaaagctacagtgaccagctcgtcccaggacacttccagtgttagctctgaaactctcgcatcctgggaaccccttcagttctgggcagaccaggagcgtgggtctctcatttatgattccacttttctgatgaggagactgaggcacaaggagatggagtgagttgctgatggtcacgaggctggtgtggcagagccaagaagggagcacaggcccaaatgggtccatggtgtccgctgttcttaggatgaaggctgaggcccttaagctgacccacaggggtctgcctcactgagctccagatactctccagccacgtcttgtaccatgatcacctaccatcatgcccctgaggtgggctccttcaagcccccggcagctgcaggctccatccagcccaggaagacgcccacatcgttccctctgtctgcgacactttcctgcctcctcttccaaatttcttcacccagctaacccctgctcatcttccaggtctcagacacaacatcacttccctcaagatgcctcccctggtgtccccgcaaggttagcaaccatcacccccttataggttcccatggaacccagcaggtctacccagaatactcatcccaacgataccccacttttgatgcttttgctgtctgcttctctctgactagtctgtgagctccctgagcagctgggtctggcctgccttgctttccactgcaccctccataccttgcgtgatgcccagcacacaggagatgcctcataaacatttgttagaaggcgtgactgagtgcttaagtctgtgtcttcacccgtaaaatgagtgaattgggttgcctcatctccagtagcatttccacctctgctctcctctgactggtcagggatgcttagtcagtggtgtctgagacccgtgtcttaatgttgatttctctctctactctgcccctccgttgcaacctgggctgcctacattctagcctccagataggacagaagaagaaagtaagtactgtgacagtttttgtctctgaaattagattctcataaccaccgctgggccttcaaactcctttaagaaaatgccagggaagggttggtccaggccccagtgtttagccattcgcctggcatcaggagcatcatcagtacagattctgccaaagaatctaagctatgctgtgctggtaaatgtctaacaaccacctctgcaaggggagagtgggaaagggagccctggtttgtagcgactaccacttcccatggtgtaaatactctgaccatgcctgatttcaggatgctaagggtctgagagctgcattggacaattcctaaattttagtaattgtctcttgtaagctagcttcagcacctcactaagtgtaagctatgtctttttttatttggtgtagaaattgctccaatgcgagggagcttaccccattcattcctccaaaggaaaagtgatagtctggaggagagaaaggggccaggccctttacagaggggaggggaaatttcaaggaagaaagatggtggagcagtctcttcggaagacagacgtatttatactctagttcgggtaagacggagagagacccctcttcccatgagtactgatcctcgaggccaaagacttgtccatcttttagtacatgtcctagaaaactgtatggcacatagttggaccacacaaatgtttctcttgtgtgtggtggtctgtttgtttgtttttgggtttttttgagatgggttctcactttgttgcccaggttggagtgcagtagtgcaatcatagcttactgcaacttagaccccccaggctcaagcaatcctcctgcctcagcctcctgagtagctgagactacaggtgcacaccaccatacccagctaatattttacatttttgtagagacagggtctcaccatgttgctcaggctgatcttgaactcttgggctcaagcaatcttcccatctcagcctgccaaagtgctgggattacaggcaggagccaccacttctgaccctcacaaatgtttcttgtacctctaattcatgttatttttgctcattagaaggagttgaagaaaacgaatactggagaacctgcctctattatataactgaattctcccaagagcactggtcaaatggaacccaagttataaagagtggtttccccaaactggctaattatctgaaactttttcaaaaagacagatttctttgttctacctggaccttctgcatgagaataccaaggggtgggtcccaggaatctgtcctttcaaaaggtttctcaggtgcttctgatggtttggctcagatggtttgagaactactgagataaagtaggactcagcagaaaggcccactgcttgtttttataaataaagttttactgacacacaatcacacccattcatttaggtattatttgtagttgtctttgtgctctaatggcagagctgcatagttgtgactggggccatgtggcctgcaaagcctacactatttactgtctgaccctttagaggtcagacatttattgacctctgagctagagcagtgcttctcagggtctttgtttaaaattagggcctaggaccctacttcatatctaaagaaggaggatgtctgtgatggaactctaagctcttgagtttgcttcccaaatggtgattctttgggttggacacggtggctcatgcctataatcccagcactttgggaggctgtggtgggaggaaggcttgagcccaggagtttaagatcagcctgggcaacataggaagacccccttctctatgaaatataaatacataaacagtttaaaatagttttacgatattgaatggaggaataattgaatgtcctatactgctgattctattctcttgctcactcttctccacactgactccccgaatgctggttctgctacttcctccagtaaaaagtaagttatttttcctttcctatgggtcacttggaagttttcaggtgctgggaagaagaggcaactatccaaagaagggaatctttggatagttcttctcaatgtagaacacaagttgagagggaccctccatctgctgctcccctctctgaaggggtttcagggtgggctgcaagccccagattgtgtggagagccgtgagggtgtgtctgggatacggtgggtctggggctacatgcaggactgagtatgtgagcccttggcatatcacgtccccgagctcacaggaccgttgccccagaagacaagaaagcattgagttgtacatatttgttgggagggccattgagaagagaaccaaagaggggcaccttgctccttcctcaagctccctcctgaccctcgggggagaaatgagagagaaccctggagactcaaagggatgctctagtatcttcctaatctctggaagatgaatccccacggaaactgaatacctggggcttctgtccacctggattaatgcgtctctaaaggagtaaagtctcaaagaagcatctcgagtcacccaccctgggccccagcctatcgcattaatctggaagacactttatttctcttttttgggaagatctgttttgagaaccacagggtgggaggagctaggaagaaggcgttattaatttcttccttttcctctcctctccttccttccttcctccactgctgcccaacaatgcccactggatcttctgctcctggcatctcatctcaacagcactgaaacctaagagtcttgtttcacatttgaccccttctgttttgctcctgttctcatctctgccaagggaggtccactcttagccatggatcaactctcagcttttgaccatcttttttttttaaactcaagaactgggaaaaaatagctatattaccatcatcttcaaatagatgggatgtctcatggaaaccaatccctcctcgaatcaggcattcatgtaatgccatgatgaggatggtgatgacagtgatggaaatttacaaagagctttctaggtgccaggcgcgaggcaccagagcagcacttttcaatgtgttatgtgtagttattccccacaacttcttcacaaggcaagtattattcatctgcacttgactgaggtataaaggttaggtaactagatcaagactgggcatcccagtggtgacggtgggttacggatcctgggctgcgtgactcagctgcttaaccacggtgctgtgcttcctcccactgctgtgtggctcagacttattttccccaagaacatctctgaccatttcatcatgctgttccctgaaaaagtcactgtttgccacatgtgggtaacatacatcttttaaaaagtcttgaaattgtagtaaaatatacaaaacatgaaatttaccattgtaacttgttttcattttttagagacaggatcttgctctgttgtccaggctggagcacagtggtgcagacctcctgggctcaagcgatccttctttcttagcctcctgaggaactgggactacaggtgtgcatcatcacacctagctaattatttttggtttttttgtctgtttttactttttttttttttacttttttgttttgctttgttgccaaggctggtcttcaattccggggctcaagcaatcctcctacctcagcctcccaaagcactgggatcacaggcacgagccactgcacccaccttaaccactttaaagtgtgcgatttagtggcccttggtacacacacaatggtgtgcaaccatcaccactgactccagaactttataatcactgccccaccaaaaaaaaagtacccattaaacagtcagtccccattctccctctgacctcagccccggcaaccaccatttcactttctgtctctgcaagtttgaggattctaggtacctcatagaagtagaatcgtacacgatgtggtcttttgtgtctggcttcatcactcagcacagtgtcctcaaggttcagccacattgtggcctgtgacagtgcttcactccttttcatggctgagcaatactccattgcatggatagactgcattttttaatccaatcatccactgattgaattttgggttgattctacctttcggctgaggacacactcttcttttggtccacattcaaagccatctaaaccccagttctgagacaccatcctgtccatgccccacacccacctccaaaccccacttctatgcagcttgagcctcagtgaaacccaagacatcctgatctgaaaaaacaaattgaaaaatggtatcctgcagctcaagagcacgttctgggtaccaggcatggttgttaagtgcttgactcatgacagtccccaagtcatcgtccttgttttacaactgaaaacactgtggtaagagagggagagtcgcttgctcatggtcacacagccagtcaggtgcagagaataacttaagcccagtctggatcccaaacggtgctattaaacaatgcaaactcaaaagtgttcaaagcggctcagactaacgaggtccctgcctcatccctacactggaagtattatcattataattgtatgttgtatatattgtaaggaagataaaattatgctaagaaagggaaagaggaactggcagagagtgtgcactgtgggcgccggtcctgactgcaccactttctagttccgtgggcttcggaccctcgcctcctgaagggctcaggcccctggtcggtacaatgcacataatagttccagcctcatatggttgtgaggagtaaacaggatcatgcacttggcaggatgattcccaattggggagatttcgcccctcaggggacacctggcaatgcctagagatatttttggttgtgaggactcagggaggtggtaggggaggctaacggcatctaatggggggagtctcgagatgttgctacacatcctacaatgcacaggacaccccacccccacaacaaaaaaactatccagccccaaatgtcactcgtctggaggttgagaaaccccccgctgaataaaatgtctggcacgggataagagctcagcaagggtctgtgaggaccacctcatttacctttgttctgaacactcccatgtctgcaggaggcccctctgccttgctcctttcgctccttttcccaggcccttctccagcctccgtcctcatgctgcactgacagcactttgcaaactgaaagcagacccagcaggaaaatcccaaacacctgcctaagggcccaccaggtgccaagcagacccagccctgctccagtaacgagcaaaagccaaacccagcaggaaaatcccaaacacctgcctaagggcccaccaggtgccaagctctgtactgggcgattcacgtgggctctttctcccggaccctcacattaacccaggatgcaagtggttcggtggagacagcctgagttttaaggcaaagaggcctgggtgggaactctactcccatcatctataatgtgggcgtaacttacccaaactcccttagattctattttcctacctgattaatggagataatattttttgcttgtttgagaattcagtgacataaggcagggatcaatcagcatttttttttctgttttctgtaaagcgctaaatagtaaacatcttaggctttcagggccaggtggtctctgctgccactcactactcaatgctgcctttgtggcctgaaagcagccacagacaacacacagtgaatgggcatggctgtgtgccaataaaactttatttacaaaagcagtagacaacacattgtgaatgggcatggctctgttccaataaaacttcatctacaaaagcaagtgtcaggatgtccacccaccgatgaatgggtaaataaaatgtgtctattcatacaatggaatgttattcagccacaaagaaagtgctgacacaggacacaacataaacgcgccttgaaaacacagtgctcagtcaaagaagccagacacaaaagcacatagggtatgactctgtctctacgacatgtccacagcaggcaagtccacagatagggaaagcagcttagtggttgcctaggaccgcgggagaggggggtgagcccagagagatggggagtgactgctcaggggcaccaggtttggaggcaatggccaacgggtacacggtttctttttcaggtgatgaaaacgttctaaaattgtttgtggtgatggatgcacagctttgtgaatgtcctaaaaactactgtcttgtacacttgatgggtgagtcataagttatgtgaattatattaatataccagtcaagttgttattaaaaaacaaagttcagaaaacaacaacgggtggtgggatggaatgtgccacccctggatgagtatgtaggtgcctacattagagtgacacaaaatacatggaaaaaaggcctggcatggtagctcacacctgtaatcccagcactttgggaggctgatgcgggcggatcacctcaggtcaggagttctagaccagcctggccaacgtggtgaaacctccgtttctactaaaaatacaaaaattagccgggtgtggttgcgggtgcctgtgctcccagctactcaggaggctgaggcaggagaatcgcttgaacccgggaggcagaagttgcagtgagccgagatcgtcccactgcaccccagtctgggcaacagagcaagactccgtctaaaaaacaaaaaacaaaacaaaacaaaaacaaacagaagagatgggaatggcgtggcggcttccttcccagcctaaccttgctgcggtgcaaatcctgcaagtcactgcacgtccctccaacccacacgaagcagcctctgactgttctgcgctgttcactgtggcatgtcctgactactcagcacgacccacccagggctccgctctcctgtgctcccatcgctctgtcttctgatgttgtgatttttccctacatgtggcctcctcttccacggctcctgggaactccatactctgggcctgtctgctcccctgacctgtcttgcttcctggaccccatctccttctggatggacatcatcagagatcctaggtgacacctcactccatgcctgccccgggactctgtaggaagctggtttgggaggaatgctttttagggctgggcagggtggtggaaagctgaaagatggatctgacaagctcacaccctcacgtcaactcacagtctagtggaggtggggagatggaaaagtaacaggcagttaaactacaacaggaatctgtgtggcacaggggggaggtggcagtggggacagtgtgcaagaggacgatgcgggcaatccagcagggcttctcggaggaggagtggcttggggcgagcctgctggacctgctggtctggaagtgtttatcatgctgtcccttctgactcgcgttgtatgcccctgtcctccttaggcttgctgagcctccaagtactgcatggtaagtctggtgactgctatttcgtgttcactcctgtgcacagaaatatacaggtactggttttttctatggtggggggtcccttaaatatcatcagaccctacactctttatccgtatcatcatctgcatcataaatgtttaacatgtttttatttgtccaacagatattaactgatgttagctctcctgtaccaaatgttattctaggtgttagagatgcagcagaggataaaacagacagaagtctgtgaccaagtgaaacttgtattccaatcagaggagaaaaaacaaagagcagtagttataggtctgctgaaggctattatgtcctatggagacaatagagtaatggggatggaaacgcagtgcgggaaacttaagttttttggctgggcatggtggctcatgcctgtaatcccagcactttgggaggccgacgtgggtggatcacctgaggtcagaagttcgagaccagcctggccaacatggtgaaactccgtctctactaaaatacaaacaattattttgaaacaaattttgtaaacatagaaaaaattagctgggcatggtggtgtgcacctgtaatcctagctactcgggaggttgaggcaggaaaatcacttgaacctgggaagcagtggttgcagtgagccgagatcatgccattgcactccagcctgggtgacaagagcaaaactctgtctcaaaaaaaaaaagtttttaaagggcgatcagggaacatgacatgtgagcaaaggcttgaagaagaagggcaggtgagccagagataactgggggaaaggcattccaggaagagagaacagtatatgcaaaggccctgaggcagctgagtccctgggatccagggacacagggagactaactttattctcttctctcctcattcgaggcacctggaagcactatttagagtttggtctccacccacttcataattcacctgatggtttcttttcttttcctttcttttctcctcctcttcctcttcctccctccctctctccctccctttcttcctttcctcttcctcttcctccctccctctctccctccctttcttcctttcctcttcctccttctcttcctgcttctttttctcctccatctcttcatttttagaagaaacaagtggctgcaaggaggaaggtaagtgcttggggtcgtaccattcctcatctataagacagtgtgtcccttctgtctgggctatgataaagccttagaagagaagatttcaggtaatcaaggccctgcaggggctttggtacctgagaggctgccttcctgaagggcatccaaagtctgcaagccactgcccctttcacactgctcatgggcatcgaggagacccaacatactgagatgtgagtgggagacatttctatcccagctgctgcttctgtggactgtgagtcctctcttcccgacatggaaattaccaagctaagtcctgggtgataggactgagggccggaaaaccagaaaatagcagcaagccaccaagtgatccagatggtggagatgagcgttttaaagtaggcagagccgggcatggtggcagcacctgtggtcccagctacccgggaggctgaggcaggaggattatttgagctggggaggtggaggctgcagtgagccgtgattgtgccaccgcatccggcctgggtaactgagcaagtctcaaaaaaaaaaaaaaaagccagaacaacactaatggttggttcttttgaaaagcgtaatacaaatttaatcctctagcattactgacaagaaaaaatagaggagaaacaaactgccaatatttggaaggaagaagagagtatcatagcagatcttgcaggtaacaaaataacaataaggtgatcattggagaaactttatgccaataaaattgaaagtttagataaaacggacaaaatcccaaaaaaacacaaattaccaaaaacaaatgaaatgatataaaaaatctgggctgggcgcggtggctcacatctgtaatcccagcattctgggaggccgaggcaggcggatc[136 bp omitted]gaggcaggagaatcacttgaacctgggaggcggaagctgcagtgagctgagatcgtgccactgtactccagactggcaacagagcaagactccatctcaaaaaaaaaaaaaaaatctgaataatcctctatctattaaagaaatgccacctgtaattaaatagccttaccacacacaaaaaagtctttcaggatcaagttagctttaatagtgaattaaaaggaagaaatcacattgatcttacaggaaatcttccagaaaattaaaaacagtcatttcccaactcggttttaggacagaataaccttgataaaagatctgacaaatacgacaaaggaaaatttcaggccaatcttcctcataaatatagatggaaaatcctagactaaatattagcaagtgcaatttggcaatacatgttaaacaatcatgactaaattcactttattccagcaatgcgacaatggtttaataggtaaaaacaaatatatggtattcccaccttattaacataaaagaaaacaagcacattatcatttcagtagatacagaaaaagaatatggtaagattttacagcttacattattttttttttgagacacggtctagctttgttgcccaggctggagtgcagtggtatgatcacggctcaccacagccctaaactcctaggctcaagtgatcctcccctctacagcctctgagtagctgggaccacaggcacgagacaccacacccagctaatttattaaattttttgtagagtttgggtctccctatgttgcccaggctggtctcaaattcctgggcccaagtgagcctcccgcctcagattcccaaagtgctggaattacagacataagccaccatgcccagccttgttcatgattaaaaaaaaaaaaaatctcagctagctaggagtagagagaacagcttaatataataaggaatagccaccaaaaacttacaaagaacaagctgtttaaggtaaaacacagttgtccctcagtatcctcaggggttgggtccaggacctccccgcagatagcaaaattccttgatgttcaagtccgtgatataaatagcataatgcttgcatttaacctatgaacagcctcctgcacactttaaatcatctctagattacttataatacaatgtaaatgctccttagttattgtactgttatatttttgtattgtttttattgttgtattgctatttttattgggattttaaaaagtatttttgaccagtttttggctgggtcctcagatgcagagtccagcgacacagagggctgagggtgtagaacatgttccctctgagatcacagatgagacgttcttgctatcaccacttgcatttcacattggactgaacgttctatccagtgcaaatcctagccaggcaagagaaaggtaataataggcaaaaggattgtgaagaaagaaagatgagcctcattttttatagatgtgattgtgtacctttgattgggagggtatatctgagaggcttgggatatgctggtgttggtgaaatataattaaaaacaaaatatcctccaaacccagagctcttctccacccaggtagaagagaaagaaaatagttttattaatgggtaagcattaaaccagaacatgatatgcgaagagactgcaaagacagaaaaaaaaaatttcacccttttatatagccaagcagatacaacttattacatacctgctctcaagataaacaacagctagtcctcaagttaaagaacttgacagctctatttgctgtacatggttcaccgtaaattcacttggttattgggatagccaactgtgtttgttaattggcttaatccaagggaaaaataaacttctagtatctttatcacaggaggtagatttgctacttggggtgaggtgcccaccaaagttaggctccatcccctcccaacaagaagctggggaagatgtttcgaggtccttgaaaacaccctcctgggtcataatgctggccgcaggcttacttagctttgaaaaagattagtgtaaacgttgaagagagagagacttgcaatggcaaaattttctaaagtaaatgctctaagcaaaggggacaaggagtaatcgcttcctgaattttcaacagggagaattcattttttttcgttttcgatttgcatttgcctgtacactggtaatgttttattttttgattggaaacctgtttagacagacaggtttacgtgtaaaaaaaaaatgagattttctgaatgtaatacttttaaaataaaaagacaagggaaaaatgttacacaggcgaaagaaacactcttgcacctcatgaggtttgacataagaaagcgacacggtcggatctggtgctagaaagatcctgctggcactcatgtgggagatggatgagaaagagaaaggatggcgtagtgggcagaggcagccatcaagagcagagcctgaagcctggggatgggggagaggtggtggttttgttaccagaaaggggtcccgatcaagacccccagagagggttcttgaatctcgtgcaagaaagaatttgaggcaagtccataaagtgaaagcaagtttattaagaaagtaaaggaataaaagactggctactccataggcagagcagcagcaaggactgctggactgagtctccttatagttatttcctgaatatatgataaacaaggggtggattatttatgagttttccagggaaggagtggagatttcctggagctgagggtgcctcccctttttaggccagtaggggaacttcctgaagttgccatgccatctgtgaactgtcatggtactggtgggcgtgtctcttagcctgctaatgcattataattagtatataatgagcagtgaggaccaccagaggtcacttgaatcgctatcttggtttcggtgggttttggcagcttctttaccgcaacctgttttatcagcagggtctttgcgacttgtatcttgtgccaacctcctattgtcatcctgtgactaagaatgccttaacctactgggaatgtagcccagtagggctcagcctcattttacccagcccctattcaagacggagtcactctggttcaaacccctctgacagtttggtgagaaatctgggcaagacagggtcagatttggtgatgtcttggatgtgaggtgggagagccaaaaggcattcctgactgtttgtctggagtatggtggtaaccaagaagggggaagctggcagtgatggtgggtgtggaccaaaatttcaattcaggaggcaggcagagatgtgagtttggagatcagaatggagagacagcagtgacaggaagctctaaggcaggaagggaaggccatcagcatcaatcatctccacggttctctccagttaaacccttctcaggcaccaccccatccaggaaaccactccccaagaggaagaacacgtggaacttcctgaaatgcgcctacatggtgatgacctacctcttcgtatcctacaacaaaggggactgggtaagaagaaggcagcacggaggggaggagtgtgaggagaggaaggaaagaggagggaagtgggggcacagaggaagcgaaggagggtgcctcagaggtgccaagcaggaagtggtgggagagcccttctgtaaaacactctcttcttcccactctcccacccgcctccatctctcatttcattcttccttcctctctccttcttccctcttttctccctccctccctccccttcctccttccctttcctcttccttttttcttccctcccttacttcctccttctctctcctccctccctattctttcctcctcccttcatccctccctttctcccttccttcctttcttcctctctccgtctgcttcctccctcccttcttccttcccatccttcttccctctctgcccttctttccttcctccctccctccctcttcttcctccccgttcctccctccctccccccttccttttcttcctcccccttttcttcctctccctcttcttcctctccctcttcctccctccctcctcctcccttccttttcttccccccctccctgttctttccttcctccttccctccttctctctccttccttctctttccttcttccctccctcccacctctagactgggataaaacttctcccttctgcactaacacagccccaggggctcctttgaaatactgtcactcattctgcctctctctctgccgctgtctcttgttctttctaagggacgttcataaggaccaagcctgttgctggttgctggggactctgatggttgagctaccttcaagaaggtcctaattctgtaagggaggcagacatccacagagagaaccagatcaccgagtggtagcacttcatgagcaggtgctagtgcaggaggcagtggcgcttatctcagcctaggggaagtgtgggctcatggaagcctttctgcaggaggtgacacctctgctgtgggttaaggacagaatggaattagccaattgaggaggggaagcaggggaagcattccagagaaacaccatgtgcgagactcagagaggtgaaaataaggcagggtgcaagaaactacaagccaggccgggcacggtggctcacgcttgtcatcgcagcactgtgggaggc[135 bp omitted]aggcaggagaatcacttgaacctgggaagcagaggttgcagtgagccaagatcacaccagcctgggtgacagagtgagactctgtctcaaaaaattaaagtaaatagaaaaaaaaagaaggaaaggaaggaaaggagggagggagggagggaggcaagacggaagggaaggagggatggaaggaaggacaagtcatccttcattcattgattcagtcagtcttcaaatattcacgtgtgtagaggacccatcctagatgctggggactcagagaagaacggaacccataaggtccttgagtccccagggctcccatgtttgggatagcaggaggactgcagagaaacaagcagccagctccaaaaaacatgaactaaatcagggtgatatcacagagtgagcagccatggccacgggcagccttccccgggcaggtaacgtctggacataagagatgagacagtggaaggatcttgccttcagagcagcttgggggcaaccactgcaagcaaagcaggcatgcacagcagaccctgaggcaggaacacactgagtaccttcgaggaaccaaaggaacatctatgtgacctgagaggggcaggggggtccaggtcatgtaaggttctcatagaccacgagaaggaagcttgtgttctaagctagtggacagccgccagcaagatcccttctgagttatcaaaggatccttctcaatgctgcctgtggagagtggatcggaatcagggcgagagtgggagcagacagactgagaggaggagacacactgagaggaggcccgaccagccagcgcaggggacctggcggtgctcatggagatgagagccgtgcagcagttctaaaggaactgcttatgcgctgggtgtgaggaataaggaaaatggagagaccagggagatgagcctgagacagtgacttcagttatgctagtggttctgaaacgggggtgacgttgccacccaggagacactcagcagtgtctggaccacaggattggttgtgacagctggaggagggagctcgactggcatccagtgggcagaggccagggaggccactcaacctgccatacggcccaggacaacacgccacgacaaaaataacccaggtcaaaacgtcaggaacctgaggctgagaaaccccagcttaggggattgtgctgcttatggggatgaggagaactggctggaagatggggaagaaggtgggagtggtgagaggcgggctgaatagagaagcaagaccagaagatgttacaaccagagggaaagagcagagggggaggacgggaaagaagcgagagggggatggggagaaagggaggtaaggaaggaattcactcgcctcaccccaactgtttctttctctgttcccagttcactttttcctcccaagtgttactgccactactgtaacttggaactggacatcaggtatgctatggcagggaagtgggcttttcccaccgctggggtggggttaggggaggttcatcccaactgcctggcatttgaggtaaggaacacaggtggatttggaagctgcaatcatagaaacccagaattccatgagaagtcccaagttcgtcacccttacttgcaagccactgcctgacaggggcaaggaaacacattgtaaatgacagggatgtgccgggcaggaggaactcctttataaattcactctataattttttcacaagtcttaggacttgtggcccaacacacacgacataaaattaaccattagtgacattcagtacactcaaaatattgtgtggccatcaccactaatctgtttccagaatcttctcatcatcctaaaagggaactctgtaccaagacatcgtctcttccccctgttcctggcaaccactagtctactctctgtctctgagaactcacctactctggtcatttcatacacatggaatcatacactacgtggccctttgcatctgggtttattcatttggcataatatttccaaggttcatcatggtataccttgtatcaggactgtattcgtttctgctggataacactccacggcatggacatagcacactttgtttatccatcatcaggtaaagtgcactgggttgctcccaccttttgactgttgtgagtcgtggtgctatgaacaagttatgttagaatatctgttttaaaatcttttggggtacaaactaggagtggaattgctaggtcatatgataattctgtgtttataacgacccactgatgcatcctggatgcagtagtgaacggggcagacaagattcctgagctcacaagaaaacaattagatgattacaggtgatacttagagctagaggaaaagctgaggatatgatgaaaaagagaactaaagaaccttgccctggatagttgggtgatgaaggaaagcctctttaggaaagtgacaatgaatcaaaggcctgtagaatgaggggttgtcagatacacagaaaacaagtgaaagagcctccaggtgaaggaactggcttgtacgaaggccctggggtggaaagtggcctagatgtgcctggagtcagaaagaaaaatgggggcaggagaagggggagggagtgggagggcactatgggaggagtgtgggtgacatgctcagcagaccacctcagacctggaagattagagcaagcattttagacccaaccttcagagccatgggaagccacggaaaggctgtcagtgagaaagagacacgtcccagtgacatgaagtgtagaggccagttaagaggctactcagtttccacgagatgacggtagcctggtcaaggctagggtccagggtacggagagaaagtacgaaagacagatgggaggtttctcttccctcgatagctgcaaagagggtccccctggcctctcccgcatcgccagagaaagtactaaggacagatgggagatttctcttcccttgatagctacaaagaggctcctccctggcctctcccacgtcgccagagaaagtactaaggacagatgggagacttctcttccctcggtatctgcaaagagggtcccccccggcctctcccctgttgccagagaaagtactaaggacagatgggagatttctcttcccttgatagctacaaagaggctcctccctggcttctcccacgtcgccagagaaagtactaaggacagatgggagatttctcttcccttgatagctacaaagaggctcctccctggcctctcccacgtcgccagagaaagtactaaggacagatgggagacttctcttccctcggtatctgcaaagagggtcccccccggcctctcccctgttgccagagaaagtactaaggacagatgggagatttctcttcccttgatagctacaaagaggctcctccctggcttctcccacgtcgccagagaaagtactaaggacagatgggagatttctcttcccttgatagctacaaagaggctcctccctggcctctcccacgtcgccagagaaagtactaaggacagatgggagacttctcttcccttgatagctacaaagaggctcctccctggcctctcccacgtcgccagagaaagtactaaggacagatgggagacttctcttccctcggtatctgcaaagagggtcccccccggcctctcccctgttgccagagaaagtactaaggacagatgggagatttctcttcccttgatagctacaaagaggctcctccctggcctctcccacgtcgccagagaaagtactaaggacagatgggagatttctcttcccttgatagctacaaagaggctcctccctggcctctcccacgtcgcctgcctttcatcctctccctggcatccccagtgccctttttacattaaaaaatgtcaactcgatcatacgatatacccccaccccctgctgcagtcctgcttaaatccaccagtggaaactcaccaactatgatgagtgtctttcaaactttaaaagaaagaaaatccaaaacacttttctactgaaatcttacatggaatcccaatatataaaaaattctaagttgcttttcattaccagaggtacttttcctaaggttaactgtgtgacatttacttattatgaagtgaggtgatgagatttgcaagcacagggtacagaaggcctctgctgtcttacgttactctcttttaccccgtatcttgcagtgtttccttttaattgttcatacggagaaaaatctgagcccacagagataagtcactgcaaatgcctaatagtttgccttgtgaagtgtacatgcccttcaggtaatacaattttttccccaaggtctgtatgtaaaacatgcaacaggttggtgtggctctccagtgaataaaaatttcagtccatgtgctatattttgggtacacacctattttaaaaaatagtttaatttttgaaatgaaaatcaaagcaaacctttgtggaattcctaaaagatcccaagttttcagggaacctggcaggaagcctctgccccattgatcaagttcaggtctctggcatggtacccaagggttctcaggctccaagctcctcctgcttctctaaacttttctccacttctcttgatccccccacccacattccatcccctgtccatattaaacctttttttttgagacagggtctcgctctgtcgccaggctggagcgcagtggcgcaatcttggctcactgcaacctccgcctcccgggttcaagcaattctcctgcctcagcctcccaagtagctgggactacaggcgagtgccaccacgcccagctaagttttgtacttttagtagagacggg[142 bp omitted]ggctggagaacagtggcccaatctcagctcactgcaacctctgcctcccaggttcaaacgattctcctgcctcagactcccaagtagctgggattacaggcatgcaccaccacacctggctaatttttgtatttttagtagagatgaagtttca[132 bp omitted]catcacattttttttcccgctccattatgccattgcacacattgattccttgatctctgtctacctagaaaagtcctcctcagtcctcaagattcacctaagcaatgctttggttcaggaaccaacagcaatccttcagattccactggggaggatgctgaaggaaatgaatggtgttgaacggtttctcaggctctcttcaaccatacattaaagcaccggtcaaaccagatagttattttcatataaaggtgtgctttcaacccattaggcaagaggttggcaaactttctctgtgaagggccaaatattacgtgttggcttttcaggtcatatggtctgttgcaactactctagtcaaagcaatcgtagagaatacactgatggctgtgactgtacccaacaactgatgaaaggataaacaaaacgtagtgcattcatacaatggattattattcagcccccaaaagaggaatggggtcctggcacgtgcaacaacacggctgaaccttgaaaacactgtgctgagtgaaagaagcagacacaaaagatcacacagtagatgatgccatgtatatgaaacagacagatctggcaaattcaaagagacagaaggccaattactagttgtcaggggctgaggggaggaaggaacaaggggagtgactgcttttaatggatttcttttttgggttgatgaaaatgttccactcttagaagtgacaattgcacaacatggcgaatgtaatgaaggccactaaattgtgccctttcaaaatggttaaaatggtgaattttatgttatgcattatgtttgcattttacctcaattacaaaaagaaactttattaaaagggatgcaggctgcagttggccctgcggaacacagtttgagggcccctgctcacatagactgtgagcccctgtgggagcaggaagtacccctgatccatccctggaactccagcacccagaagcaaaccttaaggttctcttcctgcaactctgagtgactccagcacaccaggctagggggtgcagcccagccaggcctgggcagtccctgctcctgcggggcgcgccctctagtgggaggtaggggtgcaacacaagctcaggcccggcgccgggacagtgaggaactggagggggcgctgcttcccactggctggtttctagaagagccctgctctgaggaggagacacttgccctggtgatggggcagagctagggtccataagatctgagggaagcgtgttccagctgctggaacagcccggtgggaatagggacaaacttggtggaacctagtgagtggggagaatgggctaagctggagggaggaggtgggcttgaggcaggtcacaaagagccctgtagaggtggatggagagggcaccaggcaaggagtatgagaatgcatgaagacgaaaatcaatgcacaaatacatttctctctcctttcttagggatgatccctgctgttctttctagtgagcctgctccatctcagcttagccttcacaaggcctccatctcccaggcattctaacctctgaagaaagctctctgtcccctggactgcctgtgtggagggtaatgaactgggtcctttaaggaatggcacctgggtgcccagaggcatggccagaaggtgtctgtgggggccatgccttagggggatgcacccagggcggctgagagagcaactgcaggagtttcccctaaaatctctcctccagatcgttctcgaactttccccactacttccataataaaatgtatacttgttgaaatggctgaaaaggctgggttattccattcgcccaacactgaaaactaacaggtatgctggtggattaccaagaatcaaacgctatcagttaactgtgcactttacaggtgaagacactacagctcagagagaccgatggctcgtccaacatcacactaagctacacagctgagatttgacccagttggactcattccaaagtccgtattcttttgtgtaaagatttggggctgcccccaccgtcctgaggaaatacagttgtgaggatatggctgttccaggaggaagccgtatccagctctccagcctgcatgtttcttgcctattctggaggaggttccttgtcctggttgaaagctttggctctggagacaggtttcttgggttcgaatcccagctccaccccttaatagatatgcaggcttggggaaggtattgtctcttaatgccttattttatcatctgtaaaatggggatagtaacagtagggtagaagttctcttatcatcatgatcagaaccatcactggttggttcatcaaataagttggttccaataggtaattaaaaatacttttaccattttgttttaaaacataaaattgtacaggcatttgctaatcttttgatataagaccagggggtttcgttgttgttgttgtataggtctatggacctacaatttccagtttgtcccttaaaagggcagcggagacacaggcatgcttgcaaagctatttaagcaaaatcctcactgcattaaaaaaaagaaaaagatcatccctatagccatcttgctcattccaacttgacatattttttgttgttgctcttattaacaatcggcctttatcacatctttcccactgaattactgttttgggtggaaacaattctttgctgatgcactcatattttcctcatttatgttaaatgtaattgcattacataattgaaataaaatccattagaatgaaaaggtttagaataaatgcaactcaactagctctgggtagtcacacaactgaaccaatagagaagaatgaaggcatattagaaagcactgcactagccaggggcattcagtgagcctgaagcatcagttggtatatttcatagacggatggaaaattcttttaccccagggatcattttaaagtggagtttaagaaacagtctactgagtttgcctcatagaggtaaagtttaaatgagataatatatatatatttttaagttccacgatacatgtgcaggctgtgcagttttgttacacaggtaaatgtgtgccatggtagtttgctgcccctatcaatccatcacctaggtattcagcccagcaggcattagctatttttccaatgctctccctccccacaatcccataccccgacaggccccagtgcgtgttgttcacccctatgtgttcacgtgttctaaataagataatatttctaaaacacactgcctggcacatagttctcaattaatgtattgttattatctagggcagtgttatccaataaaaatctgtgagccacacttatttcacacttcctactagcccagaagcccggtaaaatcaatttgaataatatgtacgatttaattcaatatatccaagatacatttcaacatgtagtcaataaaaaaaattattaatgagatcagttatatccttcattttgtatgaagtctttgaaatccattgtgtatttttcacttatggcacatctcaatttgaatgctaaaattgatctgcaattatattttctaacatttatagttaaagagtagatccacatatccaagttgttccaaacagggttaaaggttgtctgataactgaaccaagtatcaatttaaaatttttcattaaaattaaaaaaactttacaagtcagttcctgcccataatccaagtctagtcataagcaagcatcatacaattccaaatggagggacattttacagaacacctagtccgtacacctcaaaactgtcaaaatcattaaaaacaaggagagtcagacacactgctgcagatcagaggagggcaggaagacatggcaactaaatgtcatgtggtgtcccacatgtgaccccagcacaggaaaaggacgttagagaaaaaactggggaaatgtgaataaagtctggcgttaacagtactgtagcaatgttacggttctgacatatctactaggcttatataagatgttaacagtagtggcagtggggaaggggtacatgagaatgctctgtactgtatcattgcaacttttctgtaaatataaaattatcccaaaattaaaaatgtaaaataaaaaatattccactcttcagctgcacttatcttacgtgtttgtgtccccatgtcctcctctgttaaatggggatgtagactgcacctatttcatacagtcatcgtgggaattaaagatggtgtttccacagaaatcctgcaaccatagttcaggcattgtcagcacaccatgcttgttagcgccagttactgttactgctgctgctatgattatgattgtttatttgtaagtgcagaggtctgggctcccatctccagacattctgactgagttgatatggctgtgtttgcataacagctcataggaagctcttgtcttttcttacagcaactcatgtgcaaacagggctgatcctttaaaatgtaataaagaaactgctaaaagccacggaaaccacccagtaagttgatgacagacagatggaagatgtattagtctgttttcacgctgctgataaagacatatccaagactgggcaatttacaaaagaaaggtttaatggacttacagtttcacgtggctggggaggcctcacaatcatggcagaaggtcaaaggcacgtctcacatggcagcagacaagagaagagagcttgagcagggaacctcccctttataaaaaaccatcagatctcgtgagacttattcactatcacaagaacagcatgggaaagacctgcccccatgattcaattacctcccacggggtccctcccacatgtgggaattcaagatgagatttgggtggggacacagccaaaccatatcagaagagaatgccaatccctccgtaggtaagttaggcaaaaatgatgtattttattttggtggaacccagtagtaactaatttttaaactagctttataaattcttttatcattaggaggtttcatacgctaaccagatgattatatgtccaggtgcttgatgttagttttttgtaacttctcctggataccattaatggcctttgtacatttaattatcccttccctttgatgatgggagtgctcttaaatttgatgtaaaatgaagttaatgtgtcagatcatgtccagacattcatatcagatttcaatcatctggtgagagtttactgggtgaccaagttatgggaaggtatagaagagtgttcaggaaaacttttagggcagcagttctcagtaggctgacttcagcccccaggggacatttggcaatgtctggagacatttttggttgtcacgaccaggagctaggggctggagagaatttttcctggcatccagtgggtgaggtgagggaagatcctcaatatcctaccacgcacagggcagccccccacaacaaagcaatgtctgtccccagtgtcaataaccctggtattgagaaactcggtaaggtctgaggccattcagctgttgagctcactgctgtctccttggccactagcacttattcggctctcagtgaatgaatgaatgcacagcacgaacctgtaatcaaggaccaagcgaactgcgggaggcagggttgctcctgagagcaaacagtgacctagttaacctggcgacaggcgtgaaaggaagtctgggtttccaatcaaaaatcgggagggaaggaaaaaagagtgaatcaattcttgcgaaaagtctctgcgcacttactagaaagcacgcggccaggaatcatgcagggcgcctgcacgcatattattatttaaataaagctgtccctcagcacaaacagcccgcaaggtcacggaaactcctccagtcccatccccgggctcggtcctcccacgaatctccccctcctcccacgtccccgccccaggcgcatgcgccctccctctccccaacccaccccagtccggcctccgccagtgacgtcaccgcaagggcggaagggaagctaaagtcgttaccatggtgaccgcgacacactcagaaacgtctactagtgacggtcaagccacctacaaccggtcccaaagccgcaaacgagtcaggcatcgtggtaggacctggcgagtggggccggggagagcgggacgcctggatcgggaacttgtcgcattcacattggctgctaggaggcctcggcgaccacttccggatccggggcgggggtcgcaactcccagcccttgctcagagggctgaactagaattcccagaagcctctgcggccgccttcctgctccttcactcctgcttcccccacaaataacagtgagtgaaagcatctaacaagcgtttccaactcgccgaatcattactagtgcaggcattttattctaagctgctttttactaaaacgtgctcttgtcgctctgaacctttaggactacaatacccagaagtctctgggagtcgccgagccctgtagtttagggttgttttgcggccagcgagacgccggaagtctgggaataaggcgggaccagggaaaaagcaggattccgattggtgaagaggccacatggccttctttaaaggacgggatagagttgcacacgcgcattgaggcgtgtcttccctggttctgcgtccgtgaagcctagagattcccgagcctgggtcacccgggcggtgtcgcatgtcgtctgcggggaggttggggctgctcgcgcgaggcgctctgggtctcatttccgaggccgaaaatgctggctccaaagtggtgccctgggagatgagggcgactcgcagattccaccctattctctgaatgggcttcgagtctccatggtaacggcccctcccagttcccctgtgacttcatagctgcccacgggaggggagaaagctgatgtgaaggggctgtgggttctcagccaagctctgtctttgaggccacctaccctataccactcgtcccggaaagggtgagccggtgacctttcaccctctctgggcctcagtttccctttttgtgaaataatgtctggtacccctgctgtgctcccttactatttcagggccccgggcaagagacacactctgtgtctcagtttccgcataggtaaagtgaggatgatgttagaatttgatgttaaaatttaggtggtggttgtgagaattaagggaacctcagagcaatggccagcacacaatgacccttcaaatgtcagcggctttgatgatcaccattcttaccttttctttggagatttggacaagttaccgccccaccttcctccagggtctttgtgtattgatctgcaggttggatgtattggatgttacgaccactaaactttcttctgagcacacacgagcagtggtgttgttctctctgagaaatactacaggctttggtgttaagacactggaattccggaaacctgtccctgtcataccagttgctgtgtgacctccgtcaatcatggttctttactgagccctgagactccgcacgtgaaaatggatggggatgaacttccagtccaggcagtgccactgactttgcttggggacctggggcaagctctgtggcccagcattgcaccatctgtaacaacataaccaaggggtgcgcaattgagctttgaggttaatttcggtgctaaaatcccggtcagtagttccgtcatcttcacagacctcaccctacccaatgcccttattgtgctccacatcccaatcaacacttactgattccagatttgtaatttttgccattgtagtgagaagtaattaactattttatggttttttaaatttgaatttttgactatcaggattagcatattttttttttcttcgttaaagactagtcaagtgcattagtgaggaggggggaaagagtagaccaaggaatttggtctgtaactgactgtggacaatacattggtagaactcactacctttgagccagccagaatctttttattattcactggatattcaggttttgcctctgtaaattttctttcattgccatttttttcaaatagttcattcaatctttgttttcagatgtgctttccacaatcaggttacaaattctctgccactaatgatcattacaattcctcttctcagcctgtttattgtttggtctgtttatggtttctcaggcttcttatttatttatttagacagagtcatgctctgttttccaggctagagtgcagtggtgtgatcttggctcactgtagccttgacctcctgggcttaagcaatcctcccacctccgccacctgagtagctgggactacaggcgcatgccaccacctgcagctaatttctgtatattttgtagagatggggttttgccacattgcccaggctggtctcgaactcctgggctcaagcgatccagccgccttggcctccagagtgctgggattacaggtgtgagccaccatgcctggactaggcttctttaaacattgaatagtgttcctttctagatgaaggaggatcacatagcacttgggagcaaagatgcagccaagtaacccagtgctggagcccacgatggagaagatctcacggccactctggccttgccctgggtgctttagtaactcgggaggaaggccacccagacactgcaggacaccagcatgctgaaggtcaggaacttggcttcgttgaaagcatcaggcaggttccttgccagaaaggctacagcaagggaccctaaaaccaagaagcccaagtagcccaagacagagtagaaggcagtgacggagccctcattacactggataatgatgtagccaggcatgaactgagggtccttgtttacgaagggaggctctgtccccagccagattccacagagggtcacttgggtaaaggagcaaaggaagacaacagaatttgttttttggggacccatccactttcggatcctgctttctggccttatagcctggaaggccctgcagaaaacacagccactgtgaacacagctgcaaaggtggtctgtgagaggaggcaggtggcagggctggggcggccgatgaagagcgaggaagagagaaagcagagtgtgagggagacaaggagggtgtagctcagagtctggttgctggccttgactatgggagtgttttggtgccacacaaactccacaaggatcagaacagagaggacagagtagaacaaggctgtgcatgccagagtcaggcccaaagtttcatcataggccaggaaggtctcctatttgagaaggtatgttcccttttcttgtttggataatgatattcaggacaaagcctgcattgttttatatctgaaataaacaaaaagggtgtcactgtctccaaaacagagcactgcacgtttggtaagattccattgcccagagctctcaccaccacagcgccatttaggtggactgtttggctggtgtgtgtgtgtgtgtgagagttgtgtgtgtgagttgtgtgtgtgcgtgcacgcaagcatgcgtatatgtgttctgcatgtgttttaaaggaaaacataaatacttcaccagcttttttttttgaccattttaatcagttttattgattcatgcttccggttcttattcagttcaaaacaaggcacattaaatacatcctcttattgctttataaatgcacgtagctcattctctatatcaaaagtaataaataatggccataaaacaccaagacctttataaaaatgacaacccagccttgaacatagtatttaacagtccaatctagaacaataacccaacacggtacatcaaagtgccacatatgaaaacatgcagtgtgtgtagtcactctagtactgagcttgcactggctattctttaaaaacatactagggctttttcactccttaaaaaaggtggacatgatgcaaacattgcaagttatagcatcactgactttaatattacatttatgtgccaaaaatctttacagatacataagagaaaataaaatcaatgataacaccgtatatttaataaaagtgaaaatgagttttttgttgtgccaaagaggaagctacatattttgaaacagacaaagccaagccagaaactgaagcagaagagggatcacgcatttaatagcagaaatcctaatacactcagtataaattgattgaaagcaggaatattgcaaacagcatgatggatatgaggcagaccaccgtggctaaacaaataatccagcattatcattattgttatgactgtggtggggctatttaaaggagtatccaactctctagcacagatgggggttccttcacctgactccccttaaaggctcttgaaataaatcacttgataataaaaggcaatccctgcatacccaccccaaccccaacagaatcaactaatgtcaagtttatatgcaaatggaaaattttttcttttgttcttggaacgaatttcaaagaagctcattcccccctatttcttgtctccctttcttaaatcaggtaaggaagctgtacaggcttaattcagaacttatggctgggtgcagtggctcacgactgtaatcccagcactttgggaggctgaggtgggtggatcacgaggtcaggagtttgagaccagcctgaccaacatggtgaaaccccatctctactaaaaatacaaaaattagccagatgtggtggcgggtgcctgtaatcctcactacccggggggctgaagcaaaagaattgcttgaacctgggaggcagaggttgcagtgagccgagattgcaccaccgcactccagcctgggcgacagaccaaggctccatctcgggaaaaaaaaaaaaaaaaaaaaagaatttacacaaaatgctggggtgctttattcacagtaatggcttgaaatcagttcatttccaaacgagtctctgggattggtgaaggaccgtgtgttttagcatttagcagattttaagtaaaagcagatatgctcaaaagaagaaaagtgtgcttttctttgtccttaaaggaacttcattcatagcaaaatatgcacaaacaagacctgtttaacaaacacagatctgctcgggccagtcgcatcctaagcccggtccctcctgtaactatggtccactggaattgggactcttctgtcgaggttctcttctgcagttttcattagtataaagagccggcttccagacacccttcctttttgaatagcactcatcagctgcaaaaattcattgagttcaacctgtccatttttattcaaatcgacttcatttagaatttcatggagtgtattttcatccatttggacattgatactctctaatacacatggaacatcaacaatggtaataaagcctttctggtctgcatcagacttacaaaatctcttcttatacctgtcactgtctgaaggcagtaggctaatttcagagccatctgttaactgttctgatcaaagtttagtctgtttcataatatagaaacttcctggttgtttcaagttgttcctgtttcttataatcatctcaattctgttctctgcccattagttcaacaatcctgagtagggcttgctctgctgcccggacatttagaaaggccaggcgaggctgaggcaggcagatcacctgaggtcaggagtttgagaccagcctgaccaacatggagaaacccaatctctactaaaaatacaaaattagccaggcgtggtgatgtcctgaccaacatggagaaacctaatctctactaaaaatacaaaattagccagggtggagacccaatctctactaaaaatacaaaattagcctgtaactccaggtactcgggaggatgaggcaggagaatcgcttgaacccaggaggcggtgattgcagtgagccgagatcataccattgcactccagcctgggtgacaagagcgaaattctgtctcaaaaataataataataataataataagccaggcgagtacaacgtgaaatcatatccacggtggtgcaggaatactccttaatcccatagttcacctctgcttcaatatatggaaattctgacacaagacgtactccaacaataggccaccttttgctagtcacacttgccattgtggccacctcaaaagccttatcaccataggtggcagcaagatgctgtgccccctcgctttcaagtccataatcctggacaagcttcatgtagagtgtggggttccaatctttacccccttgaaggaaaagcccagctgttctacttggtcctgctttcaaattgtgggttttgatagcagcatttagggtatcttcgccacagaccggtaagttgtccactttccacctgctgtagtaataagacttctctcactgacatggacaacatgatttcaggagatagactgagtatctgcagatttgggatctgtaacaaggggacggatactgctccacgctgctaggatgtcgcccctcttctcacctcaacatcacagctcaggtaattacgtgcttcattcaaaatgaagttaatatcttcttctgaaggacttggatggtgtgtaatatcagttggggtatcagtagtgccagcaatcatcatcttttgccagggtaagaagaaaataactcgcccatcactggtcaagaagtcccatgccctctgggctgtaataaccaggcatcacaatgtggacaccagcagttggctggcagatagctgcagcatccttatcatctattttgcacacagagtctgtgaaatgtccaacggcattgataacacacttggctttcatgtcaaattcctgccctgtgaggacatccttgcaccatgcaccactcacacgcactttcgctgtctgtctgggtgtctgtcttcttaagcaagctcactacctccctgtcattgactgtggcatccccatatctggcagcagtcagcacaatggcaaggttcatccatgcatcgttatgtcgtccatcatagtagacaattcctcctaccagtttgtccttctggagcattgggaaatgttcaagggctcttgatttgctgaggacataactgcttttcaggcaattacttcctgcaaccaaatcatacagcttgattcctacccagtagtaaggtaactgccaccacttgtaaactggaagcatgataggcaatggagctgataaatggggagaaatttctggcaggttggcacgctcatcaagggcttctgttaccatccggtactgctcaatatccaacttcatcatggccttctgaagatatctcacaccaccatggatcaaattagtgcttctgctgctggtccctggtaagtaatcatctctttctacaaggctgtttttagtcctctggtgacggcatctagtgcacagccacttcctctttcttctcctcccataacaaggatatcaaattcagatatatttttgcaaagtcagtagctgagcgtctctggaaggaggctccctgttaacaggttctgaaatgcagtctgctgcttcaacatagaccaggctcatttgtttccttctgtaataagcaaactgagaaagtcctaaaacagttgcaagagcacctccttcaacaagaattgtccctttcactgccttttgaaaggccatttcttagcctgaggacttctcattgtctgccgccagatctggcttcccctattccacacctctcagccggcaggcttccctaggcctacaaatttgtccaggaggcgggcgaccccgcaaccccaccatcagagctcagagccctcgcctggctttacacttcaccagcttttccagtaatactgggggcaaaatatcctggaaaaacttccactacagtgtctttaataattgtggatcttacctctctgttcatctctgtctctatctcatgtaaacgcgttccctccctgcccaatctatctctcgccatcttgatatctatctatagatacagacatgtagtcgcctctcagtatgtctgtaggggattagttctaggatcatctcaggcaccaaaatctcaggctgctcaagtccactgcataaaatgaagtactatttgcatataacctagcacttactcctgtatactttaaatcatctctagattacatataatacctaatacaatgtaaatgctatgtaaat[170 bp omitted]gcctcccaagtagctgggattacaggtgcccgccaccacgcccggctaattttttatattttcagtagagacggggtt[145 bp omitted]tgtcactcagagtgcgctggcacaatcacagctcactgcagcctcaacctcccaggctcaagtgatcctcccacctcagcctcctgagtagctgggactaggtgcatagtttattttttgtagagacaaggtctcaccatgttgcccaggctgatctcaaactcctggactcaagtgatccttctgccttggcctgccaaagtgctgggattacaggtgtgagctactgtgcctggcaaaaaaatatgtttgatcccaggtttgttgaatttatggatgcagaaccctgaggcagaacttttttttttttttttttttgagacagcgtttcactcttattgcccaggctggagtacaatggtatgatctcggctcactgcaacctccgcctcccgggttcaagcgattctcctgcctcagcctcccaagtagctgggagtacaggcatgcgccaccacagcctgctaattttgtatttttagtagagatggggtttctccatgttggtcaggctggtctcaaactcctgacctcaggtgatccacccgcctcagcctcccaaagtgctgggattacagtcatgagccaccatgcctggccggcagaacttttttttttatagatacataatagttatatatattgtgggatcagtggtattttgatgcatgcatacaatgtctaatgataaaccaggacaattgggactccatcaccccaaacctgcaccctttctttatgttggaaacatttcaattcctcccctccagcaactttaaatcatacaacaaattattgttaactatagttgccctgctgtactactgaacagtagatcttattcattctatccaactgtatttttgtgcccacaaaacaacctctctcctttccccctctattcatagcctccggtaaccaccaatcaactctctaattccatgagatccatgtttttagctcccacatatgagtgagaagatggaatatttgtccatctattcctggcttatttcacttaacataatgtcctccaattctatccatgttgcagcaaataacattttattcttttttatggctgaataatattccattgtgtatatgtatcatattttgttcttcagttggtcaagaggtatatgaaactctgttcaacatcagcacatcagggaaatgcaaatcaaaaccacaatgagaaattatctcactccagttaaaatggcttttatcagaaagccaaaaaataatggatgctggtgaggatgcagagtaaggggaaccctcgtacaatgttggtgggaaagtaaattagtacagccactatggaaaactgtggtggttcatcaaacaactaaaaatagaatccccatgtgactggcattcccactgctgtgtacatgttcaaaaaaaaaaaaaaaaaaggaagttagtaggtcaaaaagatatctgccctcccacatttactgacacaaatttctgagggcctgtggaggaaaagttaaatattaagtttgaattcaattgaacatggccacaaacaatggtcaccaagtcctggaacaggttgtgtgagccccttgaggcattcacccagcactgttttggagaactgtctatttcaatctattcctatacattagttattgaaaaacaatagacaaccacaaaaaaaagttgacctttttgtgttccttgagcccagtcgtgaagggcccttgtgactgggcctcatgtcaaacaactccttacaaaaagaactagggtcccagactgcgttgaagcttcatgagacctctcattttctgtgcatggacgagtgtctgactctggagcctaggctgttgcttcccagcctggtggtgaatcctccatagtctggtgagtgtaaatagatgtatatcttttcccttcttccctccccattgcaatttgcttattatatccatttgcttattatataatttgcttattctatctacattgccatttacgtgggataaaggttgtttacccttaaaggtattgtgtgtgtgtcttttcttctcccctcacacgtttcccacacagaatggggcccctccccagaaactgtcttccttcctaatgtcccgctttatgggagctcagttcaagatgagatttgggtggggacacagccaaaccatatcaatgactgctttgtttggcccagattccagttgtatctactgggagaggaattatcccctgaaagagaacagggaggtcatggggcttagcttgctaggttcccttcttgtgtgaatttcactcttgcatgaccttttatccctgcctgaaaactgttgccagatagaatgcatccaggtttgttgttttctgtatcaggaagtccagtctagcaccagtcactctgtcatcaccagaagtagacacttaaaaaaaaaaatagcgtttgaaggggttaaggagggagaattcattagattagtgaggcagatatactggttatctgttgttgttgttgttgttgctgttttcaggatttcagggcctagattttatgacaagaaatatttcaagaggattagagtgtggtgttaaagaattaagaagacaatatatattgagtgccttttgccagctttgagttttgattaacaaaaaattacatatatttagagtgtacaatgggatgtcttgatgtatgtatatattgtggtttttttttttgagatggagtcttgctctgttgcccaggctggagtgcagtggtgtgatctccgctcactgcaagctccacctcccgggttcacgccattctcctgcctcagc[176 bp omitted]gcctggcctgatatacgtatatattgtaaaatgtctaaaacaagctaataaatatatccacatctcacagttaccattgtgtgtgtgtgtgtgtgtgtgtgtgtgtgtggtgagaacatttgagataactcttgaaaaatttcaagtacacattaggattctctatgttcaccatgctatacattaggtctctaacagtatttcatcttatagctgaaagtttctgcccttagacaagcatctccccaatcccccaaccctccacccctggtaactgccattctactctctgttactactctctgagtttgactttttaatattccacatataaatgggaatcacgcagtatgtggctctctgtgcgtggcttatttcacttcccatagtgtaccgctgggtgcctttcagtactgggcgattaactgcaaatgacacccccacccacacatgctctcacgtaaatgtgcggcatctctccctccacttcactaatggtacaaatcccactagatctcgagtctcctctgctttgatttccatcatgggccctaatatgcaacatattgatgcgctgctcataatcaatcatgccaagtcttcttcatgcctgtggcttcctcttcaacacataaagaaaccagccttgagcagaacatagcagctgaaagacactccttacactttgctctgtacccatcattcactcatccagcaaacattcactcagtgctatatgctgacccacctacaatgcccttcacgagttgaggttgtgcttaacctcaaaatagtcatgtgacacttacatgaatatagaaaagctacagtgattttttttttttgttagagatagagtctaatttcaggtgtccattaggatttactacattcgtcatgctatatatacattaggtctctaatgtcacccaggctggagtgtagtgacacgatcatggctcactccagcctcaaactcctgggctcaagcaatactcctgcctcagcctcccaagtagctaggactaaaggtgcatcccaccgcacctggctatgttttttattctttatagaaatggggtcttgctatatttctcaggctggtctcgaactcctggcctcaagcaattctcccatctcacctcccaaagtgggggattacaagtgtgagccatagcacctggccaactgcaatgattttaattataaatatatatatttattaataatacatttactatgtttatatattatgttttataatgtacatgttaaatatgtataccatataagtcatacacatattgaatataaatatgcacattatattaaatgacattaaatatatacaaatatcttatatgtatgatatataattttacatcccaaaatgcatattttacaatataagtgcatgcatatcttatactatctaggtataaatgtattttatgtattctatacaaatactatacaatacataaatttatgtatatattcaattttacacatctactaatatatgtaatctattttgtttttacatgtgtatttacatacacatgcgatacatatgcactgtagttcatgtattacatatgcatagttgtgtgttatatgtagtattacataagtatccatacgtgtatatatttcccatgtaaatgaatatgtgtagtatagataattcatatatatcaaaatatgatagtatacatgatatattcacattagtacatattttgatacatatacattataaaccttacatacatttatattatgaagtatatccacatagttagaagtagcttaataataaactcaacatttatggtagtggtcatgtatgggagtagcacagtgaagggagaaagagagaagcatggatggacaggagaagtgatcagtgtttactccttaggtggatggggatgtttttggtagttcatcattttactatgttttataactgacatgtatgttgcaagttgttttttcaacatattgaatacttccaaagatacaattataaagaaaaatgctgtcacagaatgcaaacttcctgttttaaaaattttactattttattataaaataattttagttttatgacattaaaaaaacatatttgtggccaggcgcagtggctcatgcctgtgatcccagcactttgggaggcctaggcaggtggatcacgaagtcaggagtttgagaccagcctgaccaacatggtgaaaccccatctctactaaatacaaaaattagctgggcatggtggtgcgcacctgtaatcccagctacttaggaggcttaggcaggagaatcacttgaaccgaggattgcagtgagctgaaatcacaccattgcactccagcctgggctacagagcatgactctgactcaaaaaaaaaaaattgttccaaaaaatgggtaaaatatggtaaagaagataatcaca[133 bp omitted]actaaaaatacaaaaaaaaaaaattagctgggcatggtggcgggcatctgtagtcccagctgctggggaggctgagg[139 bp omitted]acagaaattttaaaaataatttgaccttggctgggcatggtggctcatacctgtaatcccagcatttagggaggccaaggtggatggatcagttgaggccagaagtatgagaccaacctggctaacatggcgaaaccccgcctctactaaaaatacaaaaattagctgggcgtggtgccatatgcctgtaaacacagctacttaagaggctgaggcacgagaatcagttgaatctgggaggcagaagttgcagtgagccgagatcgtgtcactgtactccagcctgggtgacagagccaggctctgtctcagaaaacaaaaacaaaaacaaacaaacaaacaaaagttgaactaaataaaaatgaagttacaacttaccagatttgtaggatgaagcaaaagaaatgctaagagggaaataggagagttatagtattaagtatatcagtaaagaagataattctatattcaatagtctatgtttataccttaggaaactagaaaaagtactgtattctgtactctaatcccaaagcaagcagaagaaataataataataattggagtagaaattattgaaattgaaaatagaaaaatagagaaagtcaacatctaaatattccttgaaatagtcaatacaatttaaaaaacataaaaaaaaagtttttcatgataatttactttctcacatcttggtaggtcaaatatcttattttgttctttgtgtatcaccattgtaatctgggtagtttatttatcccaacaatgaatgtttttatttttaaaaaatttttatttcaaaactaatttccactttaggttcatggaatacatgagtaggtgtgttacttaggtatgttgcatgatgctgaggtttgatgattgatcctgtcactcagatagaaagcacagtacccaatagtttttcagcccttgcctcttgtcttgcttctcccctctggtactccccagtgtctactgttcccatctttatgtccatgtgtgctcagtgtttaacttccacttataagtgagaacatgcagtgtttggttttctgttcctgtgttaattcacttaggataatggtttctacctgcatcgatgtcactgcaaagcacaagattttgttccgttttatgactgcatagtattccatggtgtatatgtaccacattttctttatccaatccactaataatgggcagctatgttgatttcacatctttgcttttgtgaatagcgctgcaatgaacatatgggtgcatgtgtctttttggtacaaaaatttattttcttttggatataaaaccagtaatgaattgctgggtcaaaggatagttctgttttaagttctttgaaaaatctccaaactgcttttcatagtggctgaactaatttacattcccaccacagtgtataagcattcccttttctcagtagccttgccagcatctcttgttttttttactttttaataatagtcattttgactggtgtaagatggcatctcattattgtggttttgactttcatttctctgacgactagtaaagttaagcatttattcatgtttgttggctgcttgttttcttttgacaagtgtctgtttacatcttttgcctacttttaagggggttactttatttttgcttgtttagttgtttactttttatgttgattctgaatattagaccttttttgatgcagtttttgaatattttctcccattctataggtggtctgttactctgttattagtttcgtttgctgtgtaattagatccaatttgtcatttttttgttgcaatagcttttgagaacttagtaataaatttttttccaaagccaatcttcagaatggtgtttcctaggttttcttctagacatctcttagattgaggtcttacatttaaatctttaattcttcttgagttaatttttgtatatggtgaaatgtaggggtccagttgcattcttctgcatatgcctagccagcaatctcagcaccatttattaaataggtagttcttcaccattgtttttctgttgttgccattgtctaaggtcagatggctgtaggtgtgtggcttaattctgggttctgttttttgttccattgatctatgtctgtttttgcatgctgttttgcttatcgtagtcttgtggtacagtttgaagtcaagtaatgtgatgcttccagctttgtttttgttgttgtttagaattgctttgacaattcaggctattctttggttttagatgaactttagagtagtttttttctagttctgtgaaaaaagatgttagtagcttgataggattggcgttgaatatgtaattgctttgagcagtatggccattttaacaatattgattcttacaattaatgaacatggaatgcttttccattaatttttgtcatctattatttttttcagcagtgttctgtagttcccctggtagagatgtttcaccttcttggttatatatagtctaggctttttttttttctttcagctattgtaaatggaattgcattctttttttttttttttttttttttttttgagacggagtctcgctctgtcacccaggctggagtgtaatggtgtgatctcggctcactgcaacctctgcctcctgggttcaagcaattctcccgcttcagcttcctgagtagctgacattacaggcacccgccatcatgcccggctaatttttgtattttggtagagat[139 bp omitted]cccttaatttcattgtttacctaaaagtcattcaggagcaagttatttaatttccatgttattgtgtggttttgagagatcttggtattgatttctatttttattgcactgtggtccaagggtatggctgccatgatttttattttttttaattgattgaaacttgctttaggctgagcttgttgtccatgtgttccatgtgcagatgagaagaatgtgcactctgtagttgtggcttcagtgttctgtaaatgtctattagggccaattggtcaagtgtcagatttaagtccaggtttctttgttagttttctgctctgatgatccgtctaatgctgtcagtggggtgttgaagtcccctactattattgtgtggatgagtcttttcatagatctagaactacggctttatgaagctgggtactctaatgtggggtacgtatgtatttagatagttaagtcttcttattaaattgaggtctttatcattatgaaatgtttttcttcatacttttttatttttgttgttttaaagtctgttttgtctgatctaagaatatctacccctgctcttttttgttttccatttgtatgattttcttccaaccttttactttgagccgtatgggtgttgtcacatgtgagatggatctcttgataacagcagacaaatgagtctttctttttaaaatcaaacttgccactctacgccttttgagtaaggcatttaggccatttatattctaggttaatagtgatatgtgaggttttcatcctttcatgaagttgttgcctagttgctttgtaggtttttattgggtggttgctttataggatctgaggaccatatacttaagtgtatttttatggtagcaggtattgttcctttgtttccatgtctagaattcccttaaggatttcttgtaaggctggtctagtggtaacaaatacccttattgcttgcttgtctgtaaaatattttatttcttctttgcttttgaagcctagtttggtgtgacataaaattctttgttggaatttcttttctttcagaatgctgaaaataggccttcaatcccttccagcttgcaaggtttctgctgagaagtctgctgttggtctgatggagttccctttgtgcataatctaacatttttctgtagctgtctttaagattttttttttttagtattgatggtagacagtgtggtgactatgtcttggtgatgtctgtttcgtatagtatctcccaggtgttctctggatttcttctatctggatgtctacctctccagcaagattagggagattttcttaaattattctctcaaatatgttttccaggtcatttaccttttctccttctctcagaaatgtcattaattcataagtttggtcactttatataatcccatctttctcaaagactttattttttttttaattcttttttttgtttgagtttcttcaaaagaccagacttcaattccgaaattcgttcttctgcttgctccagtctattgataaagcttttaattgtattttgaaattccttaattgagcttttcaataccagaagctctgactgatttctttttgacatgtttatctcttccttcatttactagattgctgtagaaatatttgtgttgattttgaaccttgccttgggtgttgctgagcttccttgcaatgcatgctttgaattttttgagagcttctcttagtaaacaataataaagtatatacctagtgacattggccacagccatctcttattcatgcatgccatctgctggtagtatgccaaactgcacaatagctcaatataaagccagacatgagaagagtccatagggctataaaagcaaagccaaaagatggtagcaaacatactgtatgctcacaccttctagggagacaggggaaaggaaaaagaaaaatatatatatatatataagaatcttgtctgcatgaaaataattacaaaaattaggaatgccaacatctccagatgagaagaagccattgtaagaattctggcatcatgaaaaatctgaatgttgtgacaccactgaaagattacactagctcttcagcaatgatccctaaccaaaatggaaaataagagattacagatttaaaaattcaaagcatgcattccaagatggacaagtctggaatgggcaggcccatgtacaggcttcctgatagcagacacaagcaccagtgtcaaccatgtacccagaggtgtgactagccatggagatcagataggaaacctccttggctccaagttctctgcatagagtggggtgttctagatgcctggaggtctgcctgggcttggactatagaccaccccactgcaccacaatctctgcaaagaaagggtggggtggctcacagactgcctattttatcacatctctaccatttggtgatgatctgatcttgcacaaattattttattattatttttaaattttttattttgttcacttttccaacatgatgtatcagttacattgacataaccatttatttttattttttatttctgtgggtacatagtaggtgtatatgtttatgggttacatgaaatattttgatataagcatgcaatgcataataatcacatcaggataaatggggtatccatcaccccaagaatttattttttgtgttacaaacacaaatatagagctcccagaggaatgggcagaattccatctttgctatttctcagccttcactggtgatacctccaggtactggaaaatctgagatgactagggactggagaggactcctagcaaaccacagcagccctatagaaaagtggccaaattattaaaagaaaaaaatactcatccaaaggtcagcaacttcaaatattaaaggtaggtaagcccacaaagatgagaaaaaaatcagcacaagaatggtgaaaacacaaaaagtcagagtgccctcttttctccaaatgaccacatcacctctccagcaagggtttgaaactgggctgagatggctgaaatgacagaagtagacttcagaatacggataaaaacaaacttcactgagctaaagtatcatgttttaacccaatgcaaggaagctaaaaagtcatgataaagcattgcatgagctgacagacaaaatagccagtgtagagaagaatgtaaccagcctgacagaactgaaaaacacaataaaagaatgttaaaatgcaatcacaagtattaatagcagaatagaccaagcagaggaaagaatctcagagcttgaagactgcctttctgaaataagataggtagacaaggatagaaaaaaaaaaaagaatgaaaaggaataaccaaacctccaagaaatatgggattgtgtaaagagaacaaatctatgtctggtgtacccaaaagagatggggataatggaaccaatttggaaaacatattttaggatatcatccatgataactcccccaacctagctagccaggccaacatttccatttgcttggtagatcttcctccatccctttattttgagcctatgtgtgtctctgcatgtgagatgagtttcctgaatacagcacactaatgggtcttgactctttatccaatttgccagtctgtgtcttttaattggagcatttagcccatttacatttaagattaatattgttatgtgtgaatttgatcctgtcattatgatgttagctggttattttgctcattagttgatgcagtttcttcctagccttgatggtctttacaatttggcttgtttttgcagtggctgctaccagttgttcctttccatgtttagtgcttccttcaggagctcttttagggcaggcctggtggtgacaaaatctctcagcatttgcttgtctgtaaagtattttatttctctttcacttatgaagcttagtttggctggatatgaaattctgggttgaaaattcttttctttaagaatgttgaatattggcccccactctcttctggcttgtagagtttctgccgagagatcgctgttagtctgatgggcttccctttgtgggtaacccgacctttctctctggctgcccttaacattttttccttcatttcaactttggtgaatctgacaattatgtgtcttggagttgctcttctcaaggagtatctttgtggcattctctgtatttcctgaatttgaatgttggcctgccttgctagattggggaagttctcctggataatatcctgcagagtgttttccaacttggttccattctccccgtcactttcaggtacaccaatcagacgtagatttggtcttttcagatagtcccatatttcttggaggctttgttcatttctttttactcttttttctctgaacttctcttctcgcttcatttcattaatttcatcttccattgctgatactctttcttccagttgatcgcatcagctactgaggcttgtgcattcgtcacgtagttctcatgccgtggttttcagctccatcaggtcctttaaggacttctctgcattggttattctagatagccattcgtctaattttttttcaaagcttttaacttctttgccattggttcgaacttcctcctttagcttggagtagtttgatcttctgaagccttcttctctcaactcgtcaaagtcattctccatccagctttgttccgttgctggtgaggagctgcattcctttggaggaggagaggtgctctgatttttagagtttctagtttttctgctctgttttttccccatctttgtggttttatctacctttggtctttgatgatggtgacgtacagatgggtttttggtgtggatgtcctttctgtttgttagttttccttctaacagtcaggaccctcagctgcaggtctgtggagtttgctggtggtccactccagaccctgtttgcctgggtatcagcagcagtggctgcagaacagcggatattggtgaaccgcaaatgctgctgcctgatcattcctctggaagttttgtctcagaggagtacccagccgtgtgaggtgtcagtctgcccctactggggggtgcctcccagttaggctactcgggggtcagggacccacttgaggaggcagtctgcctgttctcagatctcaagctgcatgctgggagaaccactactctcttcaaagctgtcagacagggacatttaagtctgcagatgttactgctgccttttgtttgtctgtgccctgcccccacaggtggagcctacagaggcaggcaggcctcctcgagctgtggtgggctccacccagttcgagcttcccggccactttatttacctactcaagccccggcaatggcaggcgcccctcccccagcctcactgctgccttgcagtttgatctcagactgctgtgctagcaatgagcgaggctctgtgggtgtaggaccctccaagccatgtgtgggatataatctcctggtgtgccgtttgttaagcccattggaaaagtgcagtattagggtgggagtgacccgattttccagatgccatctgttacccctttctttgactaggaaagggaattccctgaccccttgtgcttcccaggtgaggcgatgcctcgccctgcttcagctcatgcacagtgcactgcaccgcacccactgtcctgcacccactgtccggcactccccagtgagatgaacccagtacctcagttggaaatgcagaagtcacctgtcttctgcgtcactcatgctgggagctgtagactggagctgttcctattcagccatcttggctccacccgccctgtactttcatttataacttgcttgttttacttaacaatgcctcctggaaattattccttaacaggtgtgaagtttatctagttctgtgtgtgtgcgtgtgcaggtacatgttgctttacatcctggtcaatatttagtgattacagatttgtaagtttttcttttattctgcaaagtaatatgctatttcgtggctttttaatttgcatttttgattactagttaggcttagcatcttcttttttaaaactgaagactagtgaaagttgaatcctggaagaggggagagtataacaagataaatctgttactgtgaaaaattaattgtgacaactcaataccttccaatgagcccagaatcttcttattcactggatattcaggtttgcttctgtaagtaacttgccaatatctcattttttttttgaaacaagttgtttaatatttattgatttttcaggagcactttacacaattagcttacaaattctctaccactaataagcattatagtccctcctcttaatctaaatatagtatagtccttctgtttatggtttctcagcttcttctttaggcattgaagactgttcctttctgggtgaaggagaatcacgtagcaattgggagcaagatgcatccatgtaacccagtactggaggtcaagatggagacaatctccacagccaccatggcctttccctgagtgctactataactcaggaggaaagccacccagatactgcagaacaccaacatgctgaaggtgagacatttggtttcattgaagatgtcaggcgggttactttccaggaagactacagcaaaggtccccagaaccaagaagcccaaatagctcaagacacagtagaaaacagtgatagagcccccattacactggatgatgattataccaggactatgggtctttgtctagggaggaaggagatgtttccaactagattccagagatggtcacttggatgagggggcaaaggtgacaacagaatgagattttagggtacccaacaggaccttgggtcctggctggccttgtagctttcccatcctgctagctggccttgtagcttggaaggccatgaccacagtgaaagttttggctgaagcagaagacacagccactgtgaactgaactgaaaaggtggcctgttcccagggttcaaagcatatatggaaggagaaagcttgacagtgacgtaatgtatttggagtgcaaaaatgcctgcagggaattcattctaaatggggagaaatacagaacaggccttaggaacaatgtgacctgggcattgtcatcttttcattgtaactaattacagactgcactggatttgtgagacatatgacagcaaaccttttctgtaaagggtaataaatatttacagtttgcaaaccagaaggtgtctgtggcaactattcaagtcttctcttgcagattgaaagccactgtaagcaatatgcaaaggagcagttgtagccgtatttagcaatatgcaaaggagcagctgtagccatatttagcaatatgcgaaggagcggctgtagccgcatttagcaatatgtgaaggagcggctgtagccgcatttagcaatatgtgaaggagcggctgtagccgcatttagcaatatgtgaaggagcggctgtagccgcatttagcaatatgtgaaggagcggctgtagccgcatttagcaatatgtgaaggagcggctgtagccgcatttagcaatatgtgaaggagcggctgtagccgcatttagcaatatgtgaaggagcggctgtagccgcatttagcaatatgtgaaggagcggctgtagccgcatttagcaatatgtgaaggagcggctgtagccgcatttagcaatatgtgaaggagcggctgtagccgcatttagcaatatgtgaaggagcggctgtagccgcatttagcaatatgtgaaggagcggctgtagccgcatttagcaatatgtgaaggagcggctgtagccgcatttagcaatatgtgaaggagcggttgtagccgcatttagcaatatgtgaaggagcggttgtagccgcatttagcaatatgtgaaggagcggttgtagccgtatttagcaatatgtaaaggaggaattgcagccatatttagcctgtgggccaagatttgcctgcccttgctctagatgacttagagaactcaacacctgcccacactgacccttccaatctgttcctggggattgtctgatactactgtcttggggaaagtctgagcatttttcccctcctccatccaaacccaaaatggacagagaaaactcactttgtgcaaaatggaaatccaaatggaaattggattccatttggatttccattttgctatggagactcatgcaacctgttctgtggccaactggacctagaaggatggtgttctctcagaatttgcaggataaagttacccaaagagtaaacatgagttgaatgtcaactttcagaaggaatcatttgaaagcccccctatcatctttctgtcagcaaaatgtctctcaaggcagtgcctgcattcaaagtagcagtggagccagcagggcagctctcactgcagacggaatgagaaaactggaggaagcagagttctaaggttagattgtcggatctccaggagaacgaagttcaaaaccacttttccttttcacaattctcttgattcttctcttagtatgagtcagggtagcaggtcacatcaatgtcatgaaaggaatactaatgataataatttaggatatttttggctacagctagagaaatctcaaacaaacaagcttaatcaggaaagcttttgacacatagttggaaatggaggtacttatgtgtttctgaaatcctgtttttattggcttctcattggctttttcatgatggcaaaattatacttagctgttagagccttcatatccatgaactacaatttctgtggaataagaaggagatatactggaactgaagcttttggtaacctcgaattttcattttggcaggcaaaccaaagagaagaaagactttgtgcttgagagttgaaaatgagaccaccttgccatgtcaattcaggtctcttaaagtcttcccttgcaggagaagagggaagtgaaaagatcttcttgtgaacagggtctggtgtggacctccagcaaactccaacagattaattcattgacagaatgggattgtcttgtgaaagggaaatatcttggatcccttcaagctgggaacccctcagggcaaatctgcctacttctgtcaattcatcaatctcattctccgtccagttttgtgcccttgctggagaggagttgccatcatttgtcatacacaagtatcaatagccaaattgatcacgcaaaagaaacgatatcagagattgaagatcaacttactaaaataaggcatgaagaaaagattagagaaaaaagaatgaaaaggaactaacaaagcctccaagaaatatgagactatgtgaaaagaccgaactacagttgattggtgtacctgaaagtgacagggagaatggaaccaagttggaaaacacatttcaggatattatccaggagaacttccccaacctagcaagacaggccaacattcaaattcaggtaatacagagaacaccactaagatactcctcgagaagagcaaccccaagacaaataattgtcagattctccaaggttgaaatatatacaatatattcaatataagctctcagtatttaaaatttagtagggcttggtgtcatttttagacccaggagtcaaggccctgtaactcaatgtcacaaggactttaaaagcacatacaggaagataacaaatgtaataaccttcattaaaaatttttttaacctcagttttttctaagcaataaaacataaaatcttctaggcaggttaccaaaaggcaaaaaaaaaaaaaaaaaaaaaaaaacccttctgcagtgcacagaatattatgttcaaaggaaacatttcctttagacctttgagaaaacactgttagcatcaggcaacaacaacaacaaaaaactggaacccaaggaaaacaaacttatatgacctgaaaatgagttgaaggagagtgttactattttgtgccttttaaaaagggagagaaaaccaaaacccgtgagatgcaataaaagttgaattttgggttaaaaattaaaaaataaaatatcttataatttattgagtaaatcaaccccttaagaaaatttcattgttctaaccaattctttagtgtataagtgttttcttacatcaaacccaatctacagaaacactactatcatttctctttatagacaacttaatcacataaaagtttttgatttgcttatttaataatcttcttatagtgacttatacagaccattcatgacatgcttggattttctggtttgttctaaatatcactttttcttaaacaactagtcattttattctaggactaaatttaccatacaagattctttctcatataaaattatttctctttaagctgtcttacaaaaaaaaaacctctttcttttttttgggggatgcccttaaataaatattttattttgtttatatcattgtagatactagtacccttagtttagtaaaagaaaactaccacatgatctttatttttaaattcttgggttaagctctggagaattttcataggcaaattctgtgtgggctggaacagtaagcactccaataaaatctatctccaggaagaatggaccacccactttatcagccaaggtgaatgctatagaagagatcttgtcaagcagaagctgactctgaacatcctgcactcttccttgattagggaaaaaaatttggaaaaagggatcttgacctcctgccagtaggagtccccacgggtgaacatgaagtaactatacatctgtttttcctctggattatatctgtgtcctccctgatattcatcatccaaggccaaccatccccacatacacggagatacagagtactgaactgggaccaatcataagacattttcctaagacatcttcctctcaaaagcaccccctggaatcctggatatcattgcacagtacccacttcaggtagtctccccatcctgaggcacctcagagctcagagttccatatagcagtgcactttggttattcttgcccattttcaaaaatacttcacttctgcctccaatcgtcttttcagaagtcactatctacttatccaagtcttctttcccccagaactgtcagacaaccttggcttgttccagcaagacctcatgcagagggcggccttcgggtcctatccaatgatccacaatttcatccttcaaatgcctaaaatggtcctttatttcatctctaattgctttattgaaactaacttcaggtttctcctcaggagaagttatatccaaagcaacttctttctggtgatgtccttggcaacccccttcagtattcctctgtgaggaggctttgccaggagaagccactagtttctgaagactactggagtggtgtgcaaagtgaatacccaaaaatgaatgcaaggtagcagttgtcttagagcattttctgagaatataagtgccatgcagcaatttgtgaaccaaagccatggtacgaaaaaatcaaaatgtaagtttcttcctgggctaccaagggctaccaagaagcttcagcaaatagcccaattctaccaaatgccagaagctgctctaagtgtattttcattgacggctcacaacaaccctgagagaggtactattatcatttcaattatagagatgaggaaatggatgttccaagactaatttacagaaggtcacacaggtagtgagtagtaaaactcttctgcctcggggtttgcctccggcactcactgcctgacttccacaggctggacgttccccacgctggagagaaaaacctctttatttctttaactttctttatatctctcttatttcctggttccttttaccttgttttatataaaacctttacataagctttgaattagacaaaagagtgtatacctttttaaaaagcacacacctgtttttagaaagaatgttttcctacaatatattttgttgaaaaatacccaaataataaaatatctattatttaatagtaatttagattttaaattatgacaattttatctacaagtattcatcccattacatttacctaattatcttatgttaatcacttacctacattgtttatgaaactgtgataggcatcatttaaaattatgaaaccaccataactgagacaataacaaagatctgacctaactgactccatcttgactctaacctccacactgtccttgttcattcctgggcataggccaaacaaactttgggaggaactcactttatatttagctttgaaacgaagatgataacagtcctttcccaaaaccaacttccttactgcctgtggactagaccacctaaagccacaagattagaagttacggtaatgttactaaattcaagatagagctatttttattaaaccaatatcaatgtcttatttattaaagattacacaagcaaaggtcattctgttttggctgtgtttatgcttttgcaacccctatgtcaagttttgacaccttatagtatttggcagg[353 bp omitted]gaggcaggagaatggcgtgaacccgggaagcggagcttgcagtgagccgagattgcgccactgcagtccgcagtccggcctgggcgacagagcgagactccgtctcaaaaaaaaaaaaaaaaaaaaaaaaaagaaaaaaaagatacaaaaaattagccaggcgtgttggcaggcacctgtagtcccagctactcgggaggccgaggcaggagaatggtgtgaacccaggaggcggagcttgcactgagcagagaacacgccactacaaatccagcctgggcaacagagcgagactacatctcaaaaaaaaaaatgcaaacaaaaatgtatgctggcaattcttaagacatttctaatattactttaataataattttaaagctagcttgtttattaaagattttactgaagtcacataaacttgaaaaagcatttgagtagtcttttctttttctgataatttgatgtacactttttaagccaattaatcagagctcttttatatattttcattagtgaaacattgtttacataacacataaatacacaagatatattagacatgcggaaagaagtacatcttcaccaattcacaaaaaccttcttttttgctatcatggattttcagattcttggtaacctgtttcacaactctaggcagttgtcagtgaaatagccttaaatttgcatattaaaggaaacaactcaggtgaaaatcaaatagaaaaatttgcattataaagtatggaaagaaagagtctggtgtgctagaaggagattaaagagggatgccaaatcaaacataaaattataaaaatttatcatagaatggtataaggagaccaattttatttagatagggattatctatcctttaactggctctctgagctctgggcagaaacccacactgaatgctgtgtttccaaaaagggagaattattatgaggctagaccatgtgatgtttttacagtgcacttagaaaaaaaattttgtaaacaatgacatttctaactgtctaaactatacacttctttaaaacccaaagagtagactttgttgtgataactattttagtcaataaatcaggtaacacaatacaaaagcaagcagtttaagagctgagatgaacttttctgtttacactcttggggtttgataaggaaaaacaggtgtctaccccaagggagttgcaccttctccattttctttaaggaacctcagactatgataaactatgtcacgttcctcatgcagcagagggtgcaagagaaaggagagacagcagaagtaaaagaagaaaacagaagtcagtcagctgagaagaaaaaacctttgctcaattaaaaaaaaaaaaaggtagagttgataaaacccaatggggaaaaaaagcaaaacagcaacgaaaacagaaacaaacaacaacaacaaaaaacatttaagcaaaacaaatgatcacacaacttatatgattatggagtgctctgatggtaacaagaaatgaagaccagctggttgctactcttctctttggccaagacaatccccaactcagttacttatctagggatcatgggtcacaggttgaagcctgctctctaccattaggggagcagggcaaaaaacctcatctttcctgttgaaggcaagctcaaactccataaaggagttgcctgaaggaaaacctggccttttttgtgttagaagcaagtaaaactctagaaaaaaaaaaaagaaaaaaagaacccacaaaaaccagagttgtacagcaaaataaactttagatatcaacggaattttgggtcctaatggtaccccattagctcagggggataagcggaagataaagcactttgtaatatgcattttagaaaaccaaggccaacctctctattacttttttttattttttattttttttttagacggagtctcgctctgtcgcccaggctggagtgtagtggtgccatctctgctcactgcaagctccacctcctgggttcacgccattctcctgggttcacgccattctcctgcctcggcctcccgagtagctgggactacaggcacctgctaccatgcccggccaattttttgtatttttagtagagatggggtttcaccgcgttagccaggatggtctcgatcccttgacctcgttatccgcctgcctcggcctatcaaagtgctgggattacaggcgtgagccactgtgcccagcctcaattattcttgttgtaaccgagcaagttacagagaaacgccacacgctgagacaaattcaggagtcctttattagccagagaccgagagacggctagtgctcaagattctctcggccctgaagaaggggttagattttcttttatactttggtttagaaaggggagtggggggagtctagttaaaacaatcttacagaaataaagcaggcaaaaagtaaaaaggataaatggttacaggaaagcaaacggttccaggtgcaggggttttaaatccatcacaaggtgataggcgcggggctttgggtgttatcaaccggacacaaacgcggggggctctgggtgctatcaactgggcaaattcctaggaactgcagatatagcttgccacagtatcttatcagttaattgcactcttggatgtgctgggagtcagcttgcacaagttaagtccttgaggaagggggtgagtaaggggctgtaagtgaaggagccaagatggtgtctgtctggctctctcagctaagggagagtcaattcaggttaaaacaaggtatcatactctaaactgtctataatggaccaaaagccagataagactcctgtagcctttatggaaaggcactaatagagtatacctccttatcccgtaattcagttgaggaacagctcatcctgaaggacaagtttattacacaaggcagctcctgatagtagaaggaaactacaaaaccaaggtacaggaccagacagcaccttagagagcctcctgaaagtggccacttcggtctttaataatatggaccaggaggaggatgcccaaaagaaagagagcaagctcgggagacggacagaggctctagcagcagctttgcaggcttgcaacatccagaatccccaaggtgcatctgctagttgctattgatgtggcaggccagggcattttaaggattgcccaggcagcaagacgaagcaacttcgaccctgtccagcctgtggcaaaaaccactggagatggaattgcccccagaggcggaggtcactgggttcaggaccagtttcacagacggtccagcaggactgatgggtcccggggctcaaatctcggctccagcggttcaaactgccattatagcacaggagctctggatgattctggaaattaaaggaaggaaagtaaacctccttccaaacactagagctagtctctctctgtcttctcctctctaatccagatctcccctctccccagagcatgaccgtaaggggcatctcaggaaaaaggctaatccaatctttttctcaaccttagttgacacacgcttgcaagccattgtcatgatagctctactagtcagaaaagcctccaagttaaccctaggaaataatttaactgtttacagcccacataatgtagcagaatcacggtcctctagggggagctcttagctgacagccagtaaagcaagatgtacataaggcaggataagcagtagtcactctccccaggcacaaacgctcaattagctgagctaatagctcttacaagagcacctaaattaagcaagggaaaggcagctaacatttacactaactccaagtatgctttcatagctctccatgctcatgctggggccatttaaaaggaaacacattttcttaccactaatggatctcctataaaatatcaccaggaaattagcaggttattatcctcagtttttcttccacaaaaaaatagcaaggatgcattttaaggaacattaaaaggaaacaaggtagccgaaagaaataaattagctgatcaggcagctaagtcaaaggcatgaaagcttcgaggtattaacacacttcaagccccttctaatctaaaaagactctgtaagagaaattaaacctcagtattcccctacaaaaatagaatagactacttctctagggcatacttttcagccctcaggatggctacagtcaggatggcaaactctatttgccagcctccagccaatgaaaagttcttaaaatccttcaccaagcttttcacttgggaaaggataaaacttatccatgtgctcagaaattgttttcaggcaggaaacctctaaattggttaagcatgtaacctctctagctcacttccagcaggaaccacctctatttaacccaagaaatttggtattagtaaaactctcacctctgtcaccttccctaagccaagctaggaagggccctacactgttgttctctcaacccccttgggcagtaaaagttacaggaatcaacttgtgaatacatcacgatcaagccaaagcctgcaaagctgaggaagcaacccctgacggtcca[143 bp omitted]gaaaccctgtttctactaaaaatacaaaaactaattcaaattagccgggtgcagtggtgggcgcctgtagtcccagctactcaggaggctgaggcaggagaatcgcttgaacccgggaggtggaggttgcagttagccaagatcacaccactgcactccagcctgggcgacagaacaaaactccgtctcaaaaaaaaaaaaaaaaaaaaaaaaaaagtagaagatcttaagctgaaaatcataaaagataagtaactgagtgagggctacgcatcttactcagtcccactcctaccttatcaaatactttttattatttctaaactttcctctcaaagttcactgccaaatattagaacttctttttaatgcatatttgcagagagatttaattattcatagaatcatatttgtaactttgtaaatccccaaagggacatgttatgtcttggcaagtaaagttttaaatgaaaattatttactatgccactcttgtgaaaattgttctagtcaagctactatttgcaatagaactaaacgctgtggcactcacaatgtggaattctggttgtaaaattctaattgctgtaatattttgccagattatcatccttataacaggattaataattgcaggaaaaatttagtcaaggttgttttgcttatagcaggactaatagttatggataagaagcatgaaagttataccatcactaagtttgaaaagactttttactaaaggttggtaatataatacacactatgaaaaggttataaaggaagagattttatgtacggaaggattttgtatggtaaattcttgtactaaagggaaataaccggttgtttaaagaaaggatgtttaggacaaatcaaaaagtgtaaaggtgttgtaagaaggtttataaaagtcataaaagaatttagtaattaaaggaaaggaattgtcaaaattaacgctaaagttattttagccacccaataatgtctttctcccaatcatattgcaagttgtaaaaatggcctaggcctaaagttattctctaacggcagattaagggggaaatgtccgcttttctctaggaaaaagttaccgctatattaacgtttctggtaatgtacaccgacatctagtggaggcaagccagtattgcaatccattggtgtaactaaaaggtgtcaaactctactgtcagttatggtctaacagggccccccactaacggtggtaattttaataattgtatcctaaccctacattttaaatcttcttgtaaaatttatattttttcaccttaaatcaaataaagtttaatattttaatattttattaaataatgttttatttaataaaacattaaataaagtttaatagaagcaattaaactttaaatggtgctgtgagctgagccacacacagacatgccattcttctgagaacctcagatcaaccacaggagaaggcccaattgctgtccccccccaaccacacgccccttttcagcagacagtacccagaaagaatcatcatctaacaccccctaacagcagttaggtttacttctctttgagggggggatattacaggagttattaagaaatcattttaggcatacagtaagggtaaaggttcttggtgaaaattttcctgtaataagaaatctcttttctaaccaagcaatctcttttctaaccaaaaaggcggcttcaagggccgggctgacaagctttgatatgcaaatgctggccactagaaactgggtccactcaacatggtgattcccaccgtcttctccttgttaccacctgtgcaaagtgtgaaggccacctccaagtaacaccatgtgttcaaaccatcatggcaacccacatttgcatattaaaaggctatggcgggagggcctggtttctcccaggctacatgaataacacacctggtcaagccaatcctttgggccctatgcaaaccagatactgcctcctccagcctccagatataagggactgtctttctgttgcgcacagggtctatctctgttcctttcccatgtctcagtacgggggagctgttctcttctttcttccttcttacttgctattaaacttttcactccttaaaactactccacatgtgtccatgtcgttaatcctatcagcaccagaccaaaaagcctggtaatcgtccagtcatcggagctgtatcaaaatgaacttgggctgctctgtcccaatgtctccatcctttgcatcttaacctgtcgcagaacaagaaaagtggtgccgctaagattgcacaggtgcagcgaatacgaacctgggaagactgtggtgtttctttagatggctggtggatctatctggattgaagggattccttttcccagcaataattttacagacctgagacgtttgcaagatgaaattgtgttgcgggatgaagatgtcattacactttcttacccaaagtcaggtagggaagtgggacccgaaactcaggaagggatgcggtgaagatactgatggagtgccttctttatgccctgcgcttgggtatgctttggtggatagtgtggggtttttttgtttgtttgtttctttgtttttgagacggaatctcgctctgtcacccaggctggagtgcagtggcacgatctcagctcactgcaagctccgcctcctggattcacgccattctcctgcctcagcctcccaagtagctgggactacaggcgccgatagtgtggtgttttaacaaagcttctactcagagagacggattaaaccagacaattaaacataatgcaaatgaatgtgattactggggcactgtagagacagagagagacatgagatcccacagaagctaaggcagatttaagtgatcatgcaggatggttagaagggactgattattgaaagaatttcggtgaaaaaataaacatttatccttagatgctgagcgtgaatgtgagactgttagatgtaaaagaaaaaatattctgacacttgggtaaatggtgaggaagaatattcaagacaattgcaacaggggagagagacccaactctgaatatagcaatgatagttggttttttgtagacaattatcaaagtaaggcggtcagtgggtgggaaattacaaagaacaacttgattaggtatcaggagcagaatccttgctaaaggcaggccaaagatttagacattaagagtggaacatgggaaatctgatcaggtatcaaggatggggggattctcattacccttgttgaaactgggtgcaacacagtttcaacacagatgtccaaagtccaggcctagtcaggaagaggactcagggaagcccaagtcaagtctggtcgaggagaaggtctttgccagatggcagtgtttcgatctattacactacagacattgtgggccacataatacattttcagggggaagagggctgtcctgtgcattgtaggatgtttagctgcatccctggcccctgcccactggagtcagtagcatactcaagtgtgataactcaaaatgtctgcagtcactgttaattttcccttgaggtggacacagtttaccccagctgagaaccgcatggatgaggagaaggcacatacatatgcctgaggtttcaggcaaagaatagtagacatgtgttggtgtcatgcattgaggcagagatcgctggtggagaagcacatacagggaagctgggattatcgagtgtaacggatactacagtgtaactagagaaagaatatgaaaggtgggaaaatgggagtgaaaatattgtaatatttagcaagtgcatgtgtgcagtggttcaatggtctattctgtgcattaagactatttggtgccattgttttactgggctgagcttatttcacttaacataatttcttccagttccctccctccatgttggctgcacatgacagttttgctctttttaaaatgatattgaggccgggcgcggtggctcacgc[131 bp omitted]gcgtggtggcaggcacctgtagtcccagctactcggaaggctgaggcaggagaatggcatgaacccgggaggcagagcttgcagtgaaccgagatcgtgccactgcactccagcctgggtgacagagcgagactctgtctcaaaaaataaaaataaaataaaaaataaataaataaataaataaaatgatattgagcagtgggagcaagaatattagggcatccaacagcccaaaggtggaagcagcccacatgtccatcgacagatgaacagataaacagaatgtactctatacaaacaatggaatattagtcgcccttaaaagagaggaagttctaatacatggtaccacatggatggaccttgagggcactatactatgtaaaagtcaggcatgaaaggataaatactgtgtgatccagtcataggaggtacctggtatagaaatattcatagagagggaaagtagtgtggtggttgcgaggagctgatgggaagagaataaaaagagttgctttttaatgtttacagagtttcaattttgcaaagagaaaaacattctggagatggatggtggtgatggttgcatgataatgtgcatatttactgaaccggacacttacaaatggttaagccagtcaattgtttgtttgtattttaccacaatttaacattttaaaagttggttttttaaaagagtattatgacaaaacagggtaaagatggccacataaaggtgaaaggaacagagtacctctagaataaagcatcagttgaatgcacttaagactaagatgaggaatgaaaacaccagttggattgatgggcaggggcattattgctgaaataacacagggtctttaagatgtagtggtggggtcaatgtcacattgaagtaggtgacaccttcttcttttttattcaggaagcttttggatagtggaaatcatcagtctgatccactccaagggagatcctagttgggtccaatctgttgttccctgggatcgttcaccatggatagaagttaaacgtaagaaagcaggtttagagagtcagaagggcccacacctctacacctcccaccttcccattcagctcttccccaagtcattcttgaattccaaggccaaggtgagttaataatggaatgtcagcgtggaccactttctgacggctgaatgactgtgttttagggacagagttaaaatgcgattccctaaactatgcatattagaaaatcttgttccaatctactgtgtcatatacaagacaatgtttctggtatttccccaggaaatcctcagccttcatttaagtaaatcctggctacatccccaaaactgaggaccccaacattaatatgctcatgtggaaagcatcttagctgtaaaccagcacctgaatttcagaggaaatgtgggtgtgacactgatatttgaaacccaacgtggtttttctattgaggatagtaatcatgatgtggggcattttgttcccaattgacagctccacgggtctcccatacataatttcagaagctccacatgaagcctctagcattgagtaaccctgggcagtaagtgtgaactttttctcatgatagattattgcttaaatcaaaacttaccaaaactatcaaaattgtataaaactgcctccaaatgtctcaggtgatgtggtagtaacagtattatcaaaatgttctaatattacagtgtcacaatgtattaatactgtgctgtatttctatttgcttatttactgtcaggttcatttattttactgtatactccatgattttgaagatcatgtcaatttttttcccaatttttactgttttacactgacttagctgatgcttaaaacattgtagagatacaagaaaatactggaaaaactaaattaaaaaataaagtaacaacaatagcccaagaccaagctctgtaaaacaattatgactgtaaaacaattatgataaaatgatttataacagaaaattccaacttgaactttggctccagactgtgtttattggcaaatagtgcaagatgtttgaagcgcagtttgtgtgtgtttaaactggcagtactgatccttccatgtatttgttcctgattatttattaacttagaatatgcatccattctttattccttcatatgtttaggtattaagcacctattatgggtcaaggtttgaatcaggattgggaagaaggtaatgattatgatgacctcaagtcacaacctaaagaaatttacagattagtatttgggaagacaaagaacagacatacacttattttctgtggtgccaatattatttactgacatcctcattaataccagataccagtgtgtagttggtgaaaaacatctactttaagatatgcaataaatagatgaaaggatgagacagggagaaaaatgtagggaaagtaccacattgtcccagaaggtaaatgcagggtttgctgatggagttatgcagatggaggatttggtaactgtcttgtagcgggacaatcagagatgggagagactgaacagagttcaggagagcctttattaaggtgagcacctggctcagtaggactagcgtccaggaaagtctgagccccgaacaaagagagcagccaccttttaaacaatcagtggtgggaattacgtgatgcaggaagcgtacttacagaagcgagaagaaaggcagttgttactccatgtcttacatccttgggaatacatggttgtgtaatatatacgtatcaatcttatgaccttgcagctgtgctggggaggtaagcaagaattcacagagctctaaggaatgtgaaactggggagtatagatgaggctcatggagcacagaaggagcacaggctgttaatatccttctctaacttctactacggggtggggacgggggcgctaccttataactaagccctgaggggaaagttaattttctggcttcacatattgtaaaattcattaatttcctcttcagtctcagtgaggagaaaaccaagagtgtataactgattccatttaccccatatccttctttgtgcaattcttataatttttacttttgcctgcagtataaaaactgcctgtggggttattgttctttaaagagtcggtagtgttttacagcaattccatcaggaaagaaaatgttgtcttttatatatactcctttactgcttctcaggttcatccctggacctgcactatgattcctgcagactgaaggagttcctttagaactggttgtcatgtaggttgtaggcaataaaaattctcatagcttggcatgtttctaagattaccttgatttttatcctcatatttaaaggatattttcataggatatagcattaagtattttttattcttcagcaatttaaagacaattttccatttgtgttaggcctccattttttggatgagaagtcagggggccttcttctcctctttctccactgtctgtgacgtgtctgtttttgtctggctacattcaatgactcagctggatgccaagggtgttaaggaactgttcatagtcactgctgtgtgttaacaagtttggagagtgaggaataataaaacatatcactgctatttggtaaatgtctggtgatcttgcctcatgcatgcgaagcccagccctcagccataagtgtacagagacccctgacacagactttatcattacataatacttacacatgttttgttggtacacgcagtattttgatacatgcatacaatgtataccaataaaccagggcaactgggactccctcaccccaaaccttcacccatctttatgttgggaacattccaattcctcttccccagcaactataccacaaaatattgttagctatagttctactgtactgtcaaatactagatcttaatccttctgtccacatgaaaaaaaatcaaattcaaattgaaggacatttgataaaaaaatttgacaagtgctcttcaaaactacaaaaacaccctgaagtacacagaccaacgacaccatgaagcaactagattaacaagtctgcaaaattaaccagccagcatcatgatgacaggatcaaattcacacataacaatattaaccttatgtgtgaatgggctaaatgcccccagtaaaagacaaagactaaaaaattggataaagaatcaagacccattggactgctgtattcaagagacccatctcacgtgcaaagatacacctaggctcaaagtaaacggatggaggaaaatttaccaagcaaatggaaagcagaaacaagcaggggttgcaatcctagtctctggcaaaacagactttaaaccaagaaaggtcaaaaaagacaaagaagggcattaggtaatggtaaaaactttaattcagcaaaaagagccaactatcataaatatatattcacccaatacaggagcacccagattcataaaacaagttatttttattttgttttattaggactgaatctctctctatctcacaggctgtactgcagtggtgcgatctcagcttactgcaacctccacttttcaggatcaagtgactcttgtgcttcagcctctcaagtagctaggattacaggcgcccactaccatacccgtctaatttttgtattttgagtagaggcagggtttcaccacgtaggccaggctggtctcggactcctgacctcaagtgatccacccgcctcagcctcccaaagcgctgggattacaggcgtgagcctccacgcccagcccataaaacaaatttttaaagacatacaaagagacttgaatacccacccaataatagcgggagactttaatacctcactgccaatattagacagatcatcgagaaagaaaatttagaaagatattcaggacttgaactcagccctggatcaactggacctgacagagatctacataagtctccacccaaaaccaacagaacatacatttttctcagtaccacatggcacttactctaaaattgatcacataattagaagtaaaccactgctcagcaaatgcaaaagaactgaaatcataacagtctctcagtccacagcacaatcaaattagaactcaagattaagaaattcactcaaaaacacgtaactacatggaaattgaacaacctgctcctgcatgacttctggataaataataaaactgaggcagaaaccaagaaattctttgaaactaatgagaacgaagagacaacataccagactctctgggatgcagctaaagcagtgttaagagggaaatttacagcactaaatagatccaacaaaaagctagaaagatctcaaatggacaccctaacatcacaactaaaagtaccagagaaccaagagcaaataaatttcagagttagcagaagacaaggaataaccaagcacagagcacaactgaagaagaaagagacacaaaacacccttcaaaaaaatcgacaaatccaggagctggttctttgaaaaaaaaaatcaataaaatagatagaccattagctagactaataaagaaaaaaagacaagattcaaataaacacaatcaaaaatgataatgatgacattaccactgaccccacagagatacaaactactgtcagagaaaatgataaacacttctatgcaaatcaatcagaaactctagaataaatggacacattcctggacacatacaccctcccaagactcaaccaggaagaagttgaatccctgaatagaccaataacaagttctgaaattgaggcagtaattaataacctacaaaccaaaaaaagcccaggaccagatggatttacagctgaattctactggaggtgcaaagaggagctggtacatttcttctgtaactattccaaacaatcgaaaagaagagactcctccttaactcattttatgaggccagcatcattctgataccaaacctggcagagatatacaacaaaaaaataaaacttcttgccaatacccctgatgaacatcgatgtcaaaatcctcaataaaatactggcaaaccaaatccagcagcacatcaaaaagcttatccaccatgaacaagttggcttcattcctgggatgcaaggctggttcaatacatgaaatcaataaacataattcatcacataaacagaactagagacaaaaaacacaacactatcttaacagatgcagaaaaggcctttgataaaattcaacatctcttcatgataaaaactctcaataaactaggtattgatggcacatatccaaaataagagccatttatgacaaaccgacagccagtatcatagtgaatgggcaaaagctggaagcactccccttgaaaacgggcacaagaaaaggatgccctctctcaccactcttattcaacacagtattggaaattctggcaaaggaaatcaggcaagacaaagaaataaagggtattcaaataggaagagaagaagtcaacttgtctttgtttgcagatgacatgatgctgtatctagaaaaccccatcaactcagcccaaaaacttcttaagctgataagcaacttcagcaaagtctcaggatacaaaaccaatgtgcagaaattaaaagcacttctataaaccaagaacagacaagcagcgagccaaatcatgaataaattctcattcacaattgccacagagaaaataaaacacctagaaatacagctaataaggggaagtgaaggacctcttcaaggagaactacaaattactgctcaaggaaatcagcgaggacacaaacaaatggaaaaacattccatgctcatggacaggaagagtcaatatcatgaaaacagccatactgcccaaagcagtttatagctttaatgctattcccactaaactaccatctgatcttcaacaaacctgacaaaaaccagcaatggggaaaggattccctatttaaaaatgatgttgggagaactggctagtcacatgcagaaaattgaaactggaccctttattacaccttatacaaaaattaactctagatggattaaagacttatatgtaaaaaaaaaataaaaactatagaaactctagaagaaaatctaggcaataccatacaggacacataagcatgggcaaagattttatgatgaaatctctaaaaccaattgcagcagaagcaaaaattgacaactaagatctaattaaaccaaagagcttctgcacagcaaaagaaaactatcatcagagtgaataagcaacctacagcatggaagaaaatttttgcaacatatccatccgacaaaggtctaatattcagcatccataaggaacttcagcaaatttacaaaaaacaaaatgccattaaaaaatgggcaaaggacatgaacagacacttcttagaagaagacatacatgtggccaacaaatgtgaaaaaaaagctgaatatcactgatcactggagaaatgccaatgatcactggagaaatgccaatgaaaaccacaatgagataccatctcacaccagtcagaatggcaattattaaaaagccaagaagcaacagatgctggcgaggttgcagagaaataggaatgcttttacactgtttgtgggaatgtaaattaattcaaccattgtgaaagacagtgtggtgattcctgaaagatttagaaccagaaataccatttgacccagcaatcccattatggggtatatacccaaaggaatataaatcattctattttaaaaatacatgcatgtgtatgttcattgtaacactattcacaattgcaaagacacgaaatcaacccaaatgcccatcagtgatagactggataaagaaaatgtggtacaaatacaccatggagtactatgcagccataaaaaggaacaagatcatgtcctttgcagggacatggatggagctgaaagacattatcctcagcaaactgacacaggaacaggaaatcaaacactgcatgttctcacttataagtgggagctgaacaatgagaacacatggaaacagggaggggaacacacacactgtggcctgtcagaggagggcatggttgggaggagagtatcaaaagaaatagctaatgcatgccaggtttaatacctaggtgatgggttgataggtgcagcaaaccaccatggcacgcatttacctatgtaacaaacctgcatatcctgcacatggtctctggaacttaaaaaaacaaaaaaaaggcagggtgcggtg[131 bp omitted]ggtggcgggcacctgtagtcccagctactcgggaggctgaggcagaagaatggcatgaacctgggaggcggagcttgcagtgagccaagattgtgccactgcactctagcctgggcgacagagtgagactccgtctcaaaaaaaaaaaaaaaaaaattaaaaaacccactgaaaatgtgtctgtaatttctttaataaatattgtacccatgtgaatttttaaggttcacagatataccacacttaagtatgaaagtaacattatgccgggcactatggcttgtgcctgtaattccagcactttgggaggccaaggtgggcagatcacctgaggtcaggggtttgagaccatcttggccaacgtggcgagacccccacctctactgacagtacaaagaatcagccgggcatggaggcatgcgcctgtaatcccagctacttgggaggctgaggcaaaagaatcacttgagcccaggaggcagaggttgcagtgagccgagattgcacaaaaaggcaacagagtgaggctccatctcaataaataaaataaaataaaataaaaaagatggccggacgcggtggctcacgcctgtaatcctagcactttgggaggcccaggagggcagatcacgaggtcaggagattaagaccatcctggctaacacggtaaaaccccgtctctactgaaaaatacaaaaaaattagccaggtatagtggcaggcacctgtagtctcagctacttgggaggctgaggcaggagaatggtgtgaaccagggaagcagagcttgcagtgagccaagatcatgccactgcactccagcctgggcgacagagtgagactctgcctcaaaaaaaaaaaaaaaaggtaacatcagccaacgctgaagaacatgtatacgggaactgcctgtaccatttttacaactttttagtaatccaaacatattttaaaatacaactactcaagaaaaaagaaaaaaatttactacttcataaaagcattttctaaaatgattaatgtcccaaagttatacattcctgtaactctcagtacctctgcatttttaatgctccttgctgtttatatatttcagtggttacctgcccatatttctctagttttcaggtgagggatatgacaagagcacacagatctaatggattttaaacagtgtatttgtctctgaacagcatcctcttagaaacactcacctctattactcagattacacatttgccagataagcgaaatgaattcatcctcttcctacttctctttttctcttcttctcgtcttccttctctgctgcctctgtctgttttctttttccccaaagtgtatttatcctcatgttctcatgcttgtggttctcatcctaggacataagagccagtggagtattgctataaagatatctgaaaatgcagaagcaacttcaaaactgggtaatgggcaaagattggaagagtttggagggctcagaagaagacaggaagatgaaagaagtttggaatttcttagagactgttaagtggttgtgaccaaaatgctaatagtaatatggacagtgacgtcctggctgctgaggtgtcagatggaaatgaggaacttattgggaactggaacaaacgtgacatgtgttatgccttaggaaagaacttggttgaattgtgtccatcctttaggactctgtgaacatttgaacttgagagtgatgatttaggttatttggcagaagaaatttctaagcagcaaagtgttcaagatgtggcatggctgtgtctaacagcctatgttcagatgtgtgagcaaataaatgacctaaggttggaaattatattctatttaaagaggaagcagaccatagtagtttggaaaatttgcaacctggccatgtggtagaagagaaaagcctattttcaagagaagaattcaagtgagctgctaagcaaccacttgatagagaaatttgcataagtaaaatgcaaacaagagctgatagcaaagacaatggcagaaaggtctcaaaggcatttcagagacctctgcagcaacccctcccatcacaggcaatccatccatccagtaaagctagaacatggaggaggggatgaacagctggagagcttctgggcaggaaaaaaatccttaagtcaggcaaagaatagattgaggagacagagaacctgaagggtgacagcactttttaaagctcagtggtcctctgcaggactttttgaaccaagcaatgtagagacagcttaccatatgaacttatgttgttactcaagaaagttgagaactaaataggttttcagctattgtaggccaataataaatcagactgtctattgatattacttttgcttcactaagaaaacaggatactactacagacacatcagaatgactacaattgaaagaacgacaatataaagtcttggaaaggatgtggaatgactggaattatcatacattggtagtgaacatgttatatggtacaaccactttggaaaactgacagttttttaaaaaattaaacacacaactatcccatgaccctacctctattacaagagaaaggagtgcacatggccatagagagatatgttcatacagctttattcacagcagttaaaaacttaaaacaagctggatgtccattaatgagtgaatgcataaactaactggtacattcatgcaatggaatgctactaagaactgttgacgtataccctacacatatgaattgctaacattatgctaagagaagccagatgcaaaagaatacatattgtatactattctaagaaggccaagaactggcaaaatgaatctatgggataaacatcagaatagtggttcttctaagggggtgatgaatgggaaggagctcaagggaagtttccagtgtgatggaaatattctttaccttctaggtgatggttacatgggcatacacatcatcgtgctgtacacttaagataggtacatgatacttcaataaaccatttttaaaagaaaacatccattcctggaaacagaacagacacatcacacataaacaagaacgctttgttcttatcagaatgtattacttcatttaaagtcatggtttggccctctggttggtagtggaggccctccaattcctatgacttgactaattattgttgatcttgagaaatgtacataatgggttgtatttgtttggctatagaaaaaagatgagatttctgtcttagcaatctctttagccgactgcctatggtacatactggattctggtgtaatgcttattcaataataaaactgttttctttcccttctacctttgtagcgaggttttctgggttggcaggaagtttctgtttttatttcctcaacaatagacacgcagtttccctatacaacatggttaaaaggcttaagcagctaaaattcactacctgctattcaaagatgagtctcatatggatacaaaagtgaacgtgtttaaagacattactgagacttccagtttctggtccagcaaggagctggaagtcctcactccatcctaacaacaaataaaaagctgaacaaactgaaaaatcagcaattcttcttagatctgtcaaataagtgaggtcacaaggcaagctactgcctccaaagttggagacaggcagacacagagaatgataacttaccagagcagaaactcacaagcagtaatctttgtgcctctgcaggaaccagaacaaggttaggaaaacctgaactctaattgatgaattgctggaagctgaatgtggttaagtctgagaattaaaaactccaagaagaccttgccatagagctatctttacactttcgtgagttttatctccaaggactctagcaggttctcacagtgaagatctgagaaaagtccccagctggttctggcaggggaagaggaagagtagccattttgaaatataccacggcattctgttcaatgctcaggagagaaactattttatcagagcctaccgtcttggggttttatcagtgtccaaatgacctggaagaaggaaaataaacaattctggtcccctcttgccaccctgtcccacttaaggggaaagggttttactcggaaggacttgtgaaattcatagtccctgggctcaggataagagactgaaacctttgggagg[135 bp omitted]gaggcaggaggcgg[137 bp omitted]gccgaggtggctccagtagcctgaattcttaacctaagcaaacccaaacccaactcagtgtaactggccttaaccaatcagaaaccaccaattaacctcctactattgacttcccactggaatgatccaaataaggctctactctaaccaatcaagtattttctttgccttgtttctgagttcagcctgtaaaagcccttccctcatgcctcttcagagaggccctaagctgcatgtgatctggcaatgcccaattcatgaactgctatctgcttaaactctttaaaattttaatgtgcctaagtttatatattatttttgcagaccatagaacacttcccctctcacaaccaaatcttatcaccatgttactaaagacctatcatgcggctcattttaccaagtacatcatattcagctatcaggaaaaaattacaaggcactctaataggcaaaatacacagattgaagattttacttaactcattaatgagaaaaactggtgacgtattaaaaccaactcataagagaacccttccccgagccgaaaaaaagtcacatttatagatcaagaatattaaagtggctggctgcagtggctcatgcctgtaatcgcagcactttgggaggtcaatgtgggaggatcgcttgaggccacgagtttgagaccagcctgggtaacatagtgagatctcacctatacttaaaaaattagccgggcatggtggtgcacacctgtagtcccagctaatcaggaggctgaggcaggaagatagattcaatccaggatgtcaagcggtcgtggctgcagtgagctatgatggtgccactgcacttcagtgttggcaatagagtgagatgctgtttcttaacaaaacaaaaaaaattaaaattaaaatgatatgcagcagcaaaagaggcaaaaactggcctcctcacaaatggagatggaggagggaagtaagctgagcctcctccaatttacttttctgtaaacaagaagtaatttgaactgccatcagtgatccacaatgtgagttggtaaatagctcaaaacaatgacaaagtagaatcaaatgacctaaaagcccatgatctaaataatgcactgaagcacagtttctccattcattgcttattttgtgccaggcacatttatgagcacttaatcctcgcaacactattagctaagaaatattgttccgtgcacacatgagcaactgaagctcataaagattaaacaattaagaaaaagtcacacagcagacacactctacagctcaagtgtcaaccaaacacccacagagatgcatatagggtcacatatcaaatcacataacctcacggagaatgggcctaacctcacggagaatggggccatcagatacaccaaagcagacgctcggtggtcccaaccacctctcataacactttcccaaacttaagacgcacatgtccacgccaatgtattatcataggcccttccccccctcttaaagcctcccacgaagtctgaacctggtactgatatacgcttcagccctcagaaggcaaccgcttgattctctgcgcaggcgcagcgttctcaacaccgccaacgggcacaaagccacgcccccacggccgaactcacgcctacgtactcagtcaccagcggaaccctctccaccaggctccgcgtcgaggccctacggggcgtcaatacgcacgcgtactttgtgtcccaggtagctcgtctcttagccatgtacgcctctgcattccggtcactgggagcggggccgtgggggctgcacatgcgcactgcgagtcctcgcctactcccagaaaccacccgggcgcatacgcggtgcggccgctgcttcaggtcggcgggctccagggagacctgggtgggcagcgtcgccgtttctcctttcttgggcagtatttttcccagcgccacgcggaggctgggccattatgaggtttgtgttgcgtcggggcggtccgtctcagaggcgctccggggaggagtgggcggctgaatggccagaggcccagggatccgttcaggtcagcgctggcgtccgggcctgagtttggaggtggcgggtgccttacaagaatgctcgcgtgatcagtgtgttggcgtttgtgtacacagaggacattattaaaattactctttgtgtgaatggttctatcccagagtaggccactggggcattgaaaaaagcccagttacatttttaggaaccagagctgcacgctaaactgttttcttttgacagtgaaatctgtcgtttttggagtttgttaggaacatggttgaaaatgggtggcagtgggttcgagaatctcgtctttgaagttttcttccttctccttagctctgcatttccaggacctggtcactattcaggacacggttccagcgcagtgcgcgttagccatgtctcaggtaagtttttgtcctgcaacatcataggttttaagtcctgggcacatctaattttgcttacttgggtggtaaagactgacaccggtacaaggctcaggtcttttcattcagcaacacgtgggactatagcaacctctcttctcagagtccatgtcctgtactttagtgttcatttattcactgaatgaattaatctgagtctccactgtcaccagtcttcttttaagcactgtgtggtgggtcagagatacattccctggagaagacaagagcctttatccggggactgtcgtcttcctgaagtaggggtgaatactcagtcatctttgaattcctttacagctccagactgagaggacgcagcatagaaaatgcttatgagtggttcagactcagtaatggtaatctgcctttggaaattttggggaatgggaatgtgattgatatcttaagcatgaaagtccaggttaacaaagtcaggccatttactaggacattagtgaaagagagtgttgtggatcacaggttccagtttgacgttgggcagcttaaagtcacaggcttcatctgtggaattccggaaaatacctattggctttctgtaaatgaggaacaagaagtatgctgcaagggagaagatggatgagctggctatatttcccaaaaaagggttctcttcagggtgtttgcatggtctctgaaattttgtgcaaatacaaccagatttgattcttagcccgctaaatgtagtcaccaagacattttgtttgaaaaatagattttcttctcaaaggggaaacttacattttcttttagggaaacaggcagtattttccctacacattctgtttgttatgatgactcaagctgttcatgaagttgttaaattatatttatgtattttaaaagaaaagttgttaaaaaaatttcaaccgtcatataacaaccatgcagaaaaaaacatttttaccactttattgtttctgtattttgatgtgaagtatttgagcttaaggctttttttaaccaccagttcttatcccatttcctccatacttccaatgcttccttaactctgttgatattttcaccatcaagatagatttccatcacttctgcaagtatttttcatgtagttttccctgccctggccctcagaggaaactaatttcttgttttgatgacagtggatttgttttgcttggcttcacgtaaatggagtcaagtagtcagtaggtgtgtgtctggcttcattaactcaacataatgattttaatgttcattaatgtccattatttgttgttgttttgctgagtattccattgtgttaatatattacagtctacttactcattttcctgttgatagacatttgggatgtttctagatttttggctattattagtaaaactgctatgaatattattgtgtaggctgagtatcccttatccaaaattcctgggaccagaagtatttcagattttggattttttttgttttgttttggaatatttgcattatacctactggttgcgcaacccaaatctgaaatccaaaatgttccatgagcatttcttttgactattacatcaacacttaaaaagttttggattttgaagcatttcagattagggatattcaacctgtatatgtctttttgtgatcttttagaagatgtagtggtagaaaaaatactggcatctgggcacagtggcgcacacctgtagtcccagcaacttgggaagctgaggcaggaggatcacttcagcccagcatttcagcaccatagtgcagcacgatcacacctgtgaatagccactgcattccagcctgggcaacataacaagactgctgtctcttaaaagaaagaaaatactggcatttgaagaatatcaagaaaaaatattcatttaaaatattgtagtctgcctcatttatggtgacagaattcaggatagcaagaggtgtgtcttgaagcaatcttggggaatcttggaggtgttggtaatattcagtttcttgatcggggatctgctgatgggtgtattgcgttgtgaaaattgatcctattggacatgaattcatcatattgatcatggcttactgcagcctcaacctcctagattcaagcagtcctcctgtctcagactcctgagtagctgggactataggcatgtgccaccatgcctggctaatttttttatttttttgtagagactaagtcttgctgtgttgcccaggcttgtcttgaactcctggcctgaagcagtcctcctgccttggcctcccaaagtgctggtgtggcaggccatgtctcaccaaatgcaggtgtccataacagctgtttcagtactgactgagtggttaaatattaaaagccactacccttacaaagaggctggaatgtaacaaaagcccaccaacagttttgcctcggcctttcctgggccttaaagcatgacaaaataatgaaggagttcttaactggacccatttaggatgaaacaagttttactgggggtctgaagaaaccccccacgcctccacaaacaaatttattggaggtctgaaggaaatccccaaaccaccgtggtttagcaggagacaagataagggtaatcactccagcaccctacacccatttagattaagtaaatttgctgaggctcctgaggaaggtcttcaagactcagaccttggttatagattaaaagaagttaatcacttgtctttagatgaatgcacacctacacatagacatatagcttagaaggtatataagctctggaaaactttgtaattgtgagttggtctggcagtaatttccaggccttctccctgtaaccggctacagaaataaaaactcccttcctccccagttaatctgcatctcgttattgggcctcaataaatagcagcctgaccctcagcttggtccaggaacactgggattataggcatgagccactgcacccagagatccttaagatttcttaaaccccacattcaagtgagaaaagaggaaccttctctgccccatgtttaatacaattaagtttcaatagcttttgacctatgtactgttgttacagatggtgcaagggtgtatttggaaaggacaacacagggcagctgtatatgattggagtgattgggaatcatagttgtattatgagttgatgaagtcccaggatattggaaaggaaaactaaccataggctgggcatcctcagttcttcccaccttcttcctaagtagctgaggatgaaaccttattctttgctcctgttgcacagcctgatggaggcaaataaggtgaaataataacacatctgctgcagttttcagaccattacatctactaccctaaaatgtagctgctagagcaaagactactttatttcctatgattctatgggtgaggaattcacactgaactcaacagggtgggaatgattaatctctgatcctatgatgcctgccagggcctgaatccccaagatgtcttcttcattcatgtattttatatttagctagaattgctggagtcatgtatctgggccactgttctttgctgctagctgagttactcagctttacttgatgtagtctcagaatgtctcactctccattggcaacgtctcattgtcttttcttatgtgtcatgagcccctatgagggcaaaacagaagatgccaagccttcctgaagctttcatctggaactagttagtgttagttctgtcatattctgttgattaaagcaaattgtaggtccgatccagatttaaagaaagaggactacactttgtttcagcaaaaaagtaatttgtaagttattctgatacactacagatccatggtagaattgatcatgactggctttcaacaaagtcaatgtgtggtcatactatgaatatgtaagattataaaatcaactatgctagttcctttacaaattggttttgaatacgtggatacacaatctctgagcaatacatttcttaaattattcagtgttttttgaatcaccctgttcatcttgaatgtttcccttattaagtatttttctatacccaaattttaataaacactatttcacagtattgctctttagtaacttaaataagctgcttttataagacaaagagtccttatcagctcctcccaacttccagttatttccttgggctcttctaaggaagtgtttatcattttcagggatgagtgacattccaagatgtggccattgacttctccaaggaagagtggggattcctgaaccctgctcagagagatttgtacacaactgtgatgctggagaattatcagaacctggtctggctgggtaagtgcttaaagcccttaattcagcaactggtcttgagtatttctttttttgtttttatactgggagtctttggtgagattcagaatttacatgagatgtggaaattggagtgagcagctttctttatcctatctgccagatgttctaatgtttttgtttttataatggcttgtgtttcgattacagtgttgatctgtcacaatacctgagtaaccagagcatagccaactctttctattcacaggactttccatttctaaatctgtgatttcactgttggagaaaaggaaactgccttggataatggcaaaagaagagataagaggcccattgccaggtgagtatgaagaaccaactagcgggggtaagccatgtatatgaaaggcataccaggtctagagggcaaagcacctttaagatgtgaaagatgctctcttccaatgttccatacgtatgtagaaattgaggctccttgagtttgagttcctaaaagggtactgatcacccaccatttatatctgcttttataaatgcctgtgggctcagaaattacaggtgtgtctttcctctttgtctatggtaagcttccttttaaattcaggatcctgtttctcatgactttttttttatttgactctttgatattgttttctttactgtaagatgacttatatagtggtctgattgtttgaatgggtgtattcattggtcatttattcattaacattaattccatttttaaaactagtcaactgttgagagtccccaagaccacccccaggttcaaggacttactaggagtcgtcacaggagtcatcatatcattgtattcatgcctgcaaagttagtgaatagtccagaagaacaccatcattctgatgccagctgcaaagtatgggggtccccaagaccaccctgaattctgacacgaattgcaaatccaaaggtccccaagatgaccctcaggtttgataattcactagaaggattcacagaactcactgaaagctgttacactcatggttagagtttattgccatgaaaggatacacattaaaaatcagccgaggaaaaagacatggggcagagtctcggaggacttccatttatgcccccacagtggagtcatggacagtgttaactcctcccaacaatgatgtgtggcagtatgcacagtgtgtggccaaccaaggaagcctatctgacccttgttatccagactcctcattagggcaccatcatgtagacatggctgactgctaatgtctcacctcaatctctagctcctctgaaggtcaccctaatatcatgtgacccaaagccccacataaatcacatagtttgattatctggtgtggtccaacgcccataggtaaatagagacacttttatcttgcaggatatttcaaggtgtcagagatgaccatctcccaggagccaaaggcaaagactagaactctctttggaaaaggttaaattatttactacacaatggctaagatttattttagcaaaagatataaaacaaaatcagcaaaggtaagctcataaggcaaagtctggaggaaatcaggaatgtgcttccgagattcctctcccaggggagtcacacaggaggtacttaattcctctagcagcaacttgtgtggtatgtgtgagataatagcagctagacaacattagacttagtgccaaggaatttacttagggaagccataaaggtaccctctgccgagtatatgctaaaaatccagaatctcagaaggaaagtaggtgttccgcataaaccacatcatctgcacaaatagcttaggcacagtaagccacttgtaccagttccgggaatggtagaaaccctcatgaaatccaagttccttagaggtcagtcaggggccaacgttgtaagcacacctttctaaggagaacagtctcaaagcctgctgtgttcttttctgagtttgtttaaaagtatagaaacttgcagtgagtttacatttgagtgaggggattaagacttgcttccacaaaccttgtgcaaagtagaaactaattaactagtagaaactaattaaaatggtttattttgatgtgtgggagttagtaaagttttagtttcaaaactgggtgatatttaaagttatagaaagtgaggaaatgaagtacatttgtgatatatttatttaaggaattgttggaattaaggtatgtcttgaactgtgagttacaaatatgtagctggatctcaatagtaattcagaattggagatgaatgtgttttttatatgttttgtggtgatggacccttaggaatggaagaaatgaattgcctatagatagcagagaaggactgattgattggtagcaagagaaacaggaaacatcctgtgttagaattccagggcctcactattcatgaagaaaaggtaaccaaagtaagaccaagacgttaggataagacaacgttgaaaggtagtttatatctgactaatttatggttcttgctaaagtggatatttctatggtgaaaaggatgtagaataatgagcttgaatcgtcacatttggtaataatcttttatttgagttcattttcaaaaccattaggccttcgtagtagaggccccctgtaaaaccagcccctcttgcacccttaatgaggttagccctctccactgtctacatacacagtataatctggaaaaaacagtgggattcccacatgtttagtgcatgaaaaacaggccagactcagtcattttccataattgaccggggttctgttctgttcttttacagcaagcacagccagcatctctgcccctctgccctttagctcctaaacagtaaaaacaactacaggttagaagggtattatgttcgtctttgtagcaagtcctattgcctttctttaatttttgatcctgttgatcagtcttcctgtaatgccattttggcccctgcaattccccatagtacatgttttcttaagctctaaatctgtttccttgctgccttcacttgaccctcttatttttcctgtttgcttagcgatctctttaatctcaaaatgtctatatcagtgagaattcataccctatctgcccctgattatatgattgattttattgtttctatattatgtcaaattgtttctgcagtaaaataattggagatgccttctgtctggacacattaattcctctggttaatgcatacatatacatacagaaactatcatttacctttttgtgttttgaaacttgtggtataacttagcacactgcatcttgtccttttcacttaatacattatcctgcagctcagaaaacagctgaagttcactctttttttagtagctaagtaatactacagatagagatataccatggttaatgatgagggacccctagtttgtttccaatataaagcctatttcaataagcattcttatcaatataaccttaaaaactggtatcttagtttcttgagtaggtgcctaaagtgggattgaaaagataaaagataggtatattacattagtttaatttgcttctgttcattgattttttttcccctttcagatgtgccaggtgcagagattaaggagttatctgcaaagagggctattaatgaagtattatcgcagtttgacacagtgataaaatgtacaagaaacgtatgtaaggaatgtggaaatctatactgccacaatatgcagcttactctccataagagaaatcatacacaaaagaaatgcaatcagtgtttagattgtgggaaatacttcactcgtcaatcaactctcattcagcatcaaagaatccacacgggagagagaccctataaatgtaacgaatgtattaaaaccttcaaccagagggcacaccttacctagcatgagagaattcacactggtgagaaaccttacaaatgtaaggaatgcaggaaaaccttcagccagatgactcatctcacacagcatcagactacacatacgagagaaaagttccatgaatgcagtgaatgtggaaaggccttcagccgtgtctcagctcttatagatcaccagcgaattcatagtggagaaaagccgtatgaatgtaaggagtgtggaagagccttcactcaaagtgcccagctcattagacatcagaaaactcattctggagaaaaaccctatgagtgtagtaagtgtaagaaatcttttgtgcacctgtcttccctgattgaacattggagaattcacactggagaaaaaccatatcaatgtaaggactgcaaaaagaccttttgtcgtgtgatgcagttcactctgcacaggagaattcatactggtgaaaaaccctatgaatgcaaggaatgtggaaagtccttcagcgcccattcttctcttgttactcataagagaacacacagtggagaaaaaccgtataaatgcaaggaatgtggaaaagccttcagtgcgcactcttcccttgttactcataagagaacacacagtggagagaaaccctatacatgccatgcctgtgggaaggcctttaatacttcctccacactttgtcaacataatagaattcatactggtgaaaaaccctttcagtgcagtcaatgcgggaagtcctttagctgcagctctcaccttactcgacactgtagaatgtgtaatggaaaatttagcaaataaccaaaactcaaaatgttaattctgattattctgtatcatcaccagtactttgtactttgagtctttttaaatatgctctgttagtttgtatggaatgatatttcattgcacttttaatttaacttaaaaatgccttcccttgactgttgatatgtattttttgtgaagtgtgtgttgaagccttgcagattattttttaaattagaggtttatcactaggtatatctcctaatgctatccctcccccctccccctaatgtaaatgacgagttaatggtgcagcacaccaacatggcacatgtatacatatgtaacaaacctgcacgttgtgcacatggtaccctaaaacttaaagtataattaaaaaaaaaaattagaggtttttcttcgggtgcatttatgagagttcaccagattttggaaatattttctattctgtaacctaccttttcatttacataacagtgataaaagctttaagtttgatcacatccaattaatcacattttttaatagttatgcttttatttgtttttcagacagggtcttactctgtcacccaggctggagtgcagtggcacaatcatggctcactgcagtctctgcctcccaggctcaagtgatcctcccacctcagcctctcaagtagctgggactacaggcatgtgccaccacacctaatttctatattttttgtagagactaggtttcaccatgttgtccaggcttgtcttgacctcctgagctcaagcagtccatctgcctcagcctcccaaagtgctgggactacagacatgagccattgtgcctgacctagttctgctttttatgttctaagaagtattatttattctatgctgagcttacatagaatttcttccatgttttctatagctatagtgtatttttaccttttactgttagatctatttcatgtttttattatggataatggaggaggtaaaggttgaattatattttcccccatattattgacccatagtgacaccagttttgggagatgtctttcattttcgcccttacgttgttattggcaccttttgcaaaaatcaattatttatcatgagtatacttctgaaatgatctgtttcatcaatctatttgtcttctcagtagttccacattgtcttaattatagctttagaggaagtcttgaaatttggtagtaagtcttccagttttgttattttaacaaatttctctaggctgggcatggtggctcatgcctataatcccagcactttaggagccccagacaggaggatcacttaagcgcagaagatcaagaccagcctgggaaatatagcaagaccttatctctacaaaaaaatttagaaattagctgggcatggtggcacccatctgtagtcctaactgctcaggaggctgaggtgggaggattgcttgagtccaggagttcaaggctgcagtgagttgtgatcacaccattgcagtccagccaggttgacagaatgagaccctgtctcttaaaaaaaaaaaaaaaaatcctggtgatgcttttctggattaaaaaataaaataaaataaaaattggcctcactactctagcttatttgcattttctaataaatgttcagagtcaccttgtcagttcctaccaaaaagcctgtcggtattataattgagattgcatgaagtctgtagacaaacttgaagagaattgacacttaacagcagtgacttccagtctgtaaccttagcataagttctatttgtctcctttaatttttctcagaaatacctgtagttttctgtatagagatcttgaatgtattttcttaagtttattaatagacattttcacaatatgtaaattcgtttgtcttttacttttccagttgtttgctacttgtacatcaaaatagcattttgtacatttatcttgcatcttgtcttgaacatttcacttattcttggagttgtcatacagatttcttaaattttttttttttcttttttttttttttgagacggagtcttgctctgtcacccaggatggagtgcagtggcgcgatctcggctcactgcaagctccgcctcccgggttcacaccattctcctgcctc[212 bp omitted]cgtgcaaatagacagtgtattcatttctggtctgtgctgttcttttttttctcatcttattgcaattgctgtgtgacctccaggacagtgttgaatgaaagtgataaatgtaggcacccttgttttgctttcagtcttaggaggaaagacttagtggggaggaagtggcaactctgagtcaggatgtagacttcttagcatatgcatttgcacatcttgctcaaatcccagatttccctataccctctatgctccctttaaaacaatgctttctttccacagtatctttcccccaagtcaataatgggtcaaatttcagcagtcccaaactggggaagttctgggactgctgtggtaagaaatggattcagacaccaaaggagctgtaggacctggctaacatgtacaagcaagaaccagaagagtatacctgggaggagatcctgagattactgcatcattaggtagaatacaaagttgaataggggagagttttttgctatggggtcactgtatgacaggattaacacactggcaagggaaaaagatgcttctaatggatgctgggacagtttttgaagcttggaaaaagcattggttctcattaaataaaatgaagatagcagaattgccatgacaaatgaggatgggatcaaaagaagtggatatacaagggagaacaagcgtcatggagatggccaatagtagctgtcccctaggcgagggctggctgcaagaggtgctgttaaggaactgggctctctagttgcaatgggaatgataggatctcagaataatggcagccaggtgatagctcttagcatcaaacgcaaggagggccataattaccatatgggtagaaggcttagaatagaatctggggagattgatcttcagaaatctatggttctggctcatagcacatgagtttgccaatggcaagtcatctgcttccaataagagtaaacttattgagacaaggggttgctccgttgcccaggctggagtacatggcatgatcacagctcaactgcaaccttgaactcctgggctcaaataatcctctcacctcagcctcccaagtagttgggactacaggcacatgccaccacacctggctaacttttttgtttctttgtagagatagggtctccctttgttgcccaggctggtctagaattcatgatatcaagtgatcctcctgcctcagcctctgagtgttggaattacaggcaggagtcatagtgcctggcccaaacttaactaaaaaacagagaaggcaaggtgcattggctcacacctgtaatcccaggactttgtgaggccaaagtgggagaattgcttgagtccaggagtttgagaccatcctgggcaacataagaaaaccctgtatctacaaaataattttttaaaaattagcctagcgtggtggcacatgcctgtggtcccagctgttcaggaagctgaggtaggaggactgcttgaatgggaggttgaggcttcagtgagccatggctgtgccactgcactccagtttgagatgccatctcaaaaaacaaaacaaaaaaaccagacagtaaatataggtgttgtggccatatagtctctgtggcaactactcagctctgctgtagtgaaaccaaagcagtcgtagaccataaatgcaatgtgtcactcagactttataaagcaggtagcgggctggatttggtttttataccctgcactaggcaaaatgggatattatgtaaagataaaggtataattcataaatagagggttagtagtatgtccctgtaagtcaaacaatataaattaaaaagcgtaaatgtctggaaactcaaggtgttggcaacatttttttaggaaattctgatccagcataccaaattatatgaaaacatggagatttttactattgcaatctagtggcttaatggacttatttagaaacttgtatccaaaaatgcagaatacatattttttcaatgttcatggtatacagaaatcaatcttgtatttaaccacacacacacacacacacacagtcaaactgggtggcacagcggctcatgcctgtaatcccagcacttataggaagtgctgggaggccgaggcgggtggatcacaaaggtcaggaaatccagaccatcctggccaacatggtgaaacctcatctctactaaaaacacaaaaattagctgggcatggtagcgtgcacctgtagtcccagctactggggagactggggcaggagaatcgcttgaacccgggaggcagaggttgtgccactgcactgcagcctggtgacagagcgagactccatctccaaaaaaagagtaaaattcaaaaagtagataacttcaggccacatttaccaaccataataaaattaaattagatattatatcacttaggatgcttttggctgcgaatttacaaaatatccaactaaaactaactgagcaatcaagttttatttttctcagataacaaggcatcaaaaaggcagttccagaattggcctagtagctgagtcttctcaggctctgggtcagcttctctgaggtccacttttttctcttcttggttccaagacagctgcagcagcttcaggcatcatgttcttatataaaaatgtttaaaagcaggaagtgagagaggaggaagtcttcatgataaacctgtctcttctgaatgaggaaaatctttcccagaagccccggcagattccactgagcaacactgggagatactggccatactgtgctgcacaggagactggaaaattagcatctgatattctcagagtccaaggcaagacacagatgctgccaataacaaggggaattgggtatggctgctgggatgacaaccaatggttgtctgtgccagtcacataaaacaatgtaacaatgtggaaattaagaaatattctcctaaatttagattatttctggatcagaaagaaacaaaaactgagattattgtaagatggtctctttatttcatcattttctgttactttcttctttcactgcctggatgtttggtagacttgaatagcatgtttagtgcatatgagtttatctttcagattttcatgtatatgcatgcattcaaaggctataaaaattcctccagtgtagctttggctttccccttaccctcacatctctttggccacatttcacatctcttggcatgttaaactctcaattcattcttttcattaccatttatggtaattgcatgatttctttgttaagcaaatgataatctggctgtttttttaacttgtaagaaaactataacttttgctcttgataaaattactacactgtggttagaaaatgtggttctggaatgtgttagaaataaaatttctcccaacctttcccagcatttttgacaattatgatctgaacaatttacatccataaaattttctttgatatgaattttcagacttaggataaaggcttacctctgaatgaaggcattgtcactggcattacattcttcaagtctttctccaagagggagaagtaagtcacagtcacaattagcctaggctaatgggctttccccattacttccattcatatggttgcttgccaacataaattctctgatgattagtaaggggtaactgctgatggaaggcttttctacatttattatattcacatgtgtttctctattatgcattctctgaggttgaacggtagttgaatcatgactcaaggtcttctcacattccttatattcatagggctttttctcagtgtgaataacctgatgatgaatcaattgtgagcaatgactaaaagccttcccacattccttacattcatatggcttttcacctgtatgaattctgtaatgtacagtaagatgtgagacccgtttgaaggccctaccacataccttacattggtagggtttctctccagtgtgaattctctgatgttgcttgagttgtgagctcactctaaaggcctttccacatactttgcactcatagggtttctcaccggtatgaattctctgatgtcgtataagagttgagccttgattaaaagccttcccacattccttacattcatagagtttcctgccagtatgaacagtctgatgttgaatcaactgagaacgatgactaaaggttttcccacattccttgcatgcatagggtttttcaccagtatgaattctataatgtactttaagatgtgagatccgattgaaggccttgccacattccttacactgatagggtttctcgcctgtgtgagttcgctgatgttcaatcaactgtgagcttcgactaaaggccttctcacaatctttacattcatacggtttctcaccagtatgaactctctgatgttgtataaaatttgaaccagaattgaaggcctttccacattccttacattcatatggtttcttaccagaatgaatattctcatgttgaattagtcgtgagccatatttaaaggccttcccacattccttacatttatagggtttctcattagtataaattccttgatgattaataaggagttccttttgccagaagtcttttctacatttattatacccaaaaggtttttctctagtatgaattttctgataaaaagtaagggatgcatgctggtcaaaagtgggcatttcttcatgtctgatgatcatctgatggaaatgtctgtctggatttccctgttgtctgtcaaactggtttctgcattcccaatcatcttggaaacttgaacactcaagaccataacttgtaaggctttccattatctcccattggggtgattcgacttcataaacatgctgctttggaaataattccttggtatcatatctggactccaatactaagaatgaaaaaaagcgaatatgtttggcttctttttttttccagataaaggaactaaaataagaactggagggtttagactcaatgcctattaactcttgaatgtagctaagcaattataaaatggacaagtagaacagtgaaaggaaaataacatacatgagatgagggaggcaataagagaggttataaaagtgattctaaaatgttagtgtggggctgggcatggtggctcatgcctgtaatcccagtgctttgggaagccaagaagggagaatcacttgaggccaggagtttgagaccagcttcagcaacacagcaagaccccatgtctacaaaataatttttaaaaattagccagctgcagtggcacatgcctgtagtcccagctgagaaaagaagactgcttaagcccaggagttagaggctgtagagagctatgatcacgccaatgcactccaacttgggtgacagagggagactttaaaaaaaaaaaaaaaagagttggtgtgggtcagaatcactattgaacaatattttttaagacagtaaatgtttctgtgagactctagaaaagacaaatatagagtgacagaaaccaaagcaaatcattggtttgacggactgtgcaggagggagcacaagggaactttttgggttgatggaaatgttcgctatcttgattgaggtgatggttatgtgggtgtataaatttgtcaacactcattaatagcacattttaaaaatgcattttattgaccataaattatgcccccaaaagagtgaattttaaaaagatgatggggatttcaagatgaaaagagttccggagatggacggtgatgatggttgtacaacagtgtgaatgtacttaacactactgaactgtacacttgaaaatggtgagcacggtaaatcttgtattttaccacagttttaaaaaataaaaataaaagtggtgttggaagtgtgtggttggatctgcaacctgcctcagtgcctggaggacatgcaggagaatgaaccagaggaatatgctggtacagtggcagctattctcatgtgtccgctagaagttagaatgacatggctgctgtcttcctctgtgaagctttttatatctgaagtttagctgaacaccatggtgttttttatatctgaagtttagttgaacgccatggctgaagcccattatcaactgaatgacatttcttaaatttcttaaatgtcatgcatttacctgaaccttttcatttcttaaaggtgaccttggaaaaagaagggcttttttccttgtttagaggattaggccagttgattgagggtgggtccttctagagcaacatactttgctgattattcaaactgcatgaaaaagctgaatgctataatggactgtgattctacctggtacattatttcagctacagtggcaggttttactgtacttatagcaaccaaccccagttgacttaaagagactcagatatagcttgactacaggtgggcaccaccatgctcagctaatttttgtgcttttttgtaaagatggggtttcgccat[138 bp omitted]tgctgaatcatacatcatagattcaaggtgatgtgctaacaaggatatcatttttaaatgttgccatgaagttcaaatgcaccttttcatactttaaattgatatatgtatataacccttaaacgtttatgttcatgataattctgttgagacttctggctaaggatgttgctatactggtatataaaatgtgcacaattaaactccagtgtgatactactcatttcagtatatatgagtgctgtattttgtgcagtagctttatcttaatatggctctttgtgaatgcactttatagcatttattgagggtgaaagagcaggagggaattctatgttacgtatttctataaaaacattggtcatttattcaacagaaccagtattcctaacatttgtctgggttttagatatgttgttctgcagatctattcactgtagtgatcccaacattattgaaaattaccaagcttttactgctctcaccagtgaaaaactgtaccttcttaaattctgtcagcatgtcacatttattgtaatcaacagtaactggatgtttctgaggtgttttgattggactcaaaagtattacaatcagtttggagacaaaaacacaatctgcattttagtttaagtatgacactgatgacttaaaaaaaaactatatacaaacgttctatataaagtttgcctccaaagtatttctctttctctttcttttttgcaggggagatggggtctcattctgttgcccaggctggagtgcagaggcacaatcatattatactacaacctcaaactcctaggctcaggtgattctcctctgtcagccttctgagtagctgggactacaggcatgagttattacgcctggctgcagagggattttaatatgtaaaagtattaacacagtgtattaactttgtgcccacgcaaatctcttttctatcacatccttatgttcttcgacagattgacttttatgcttctccttttagaaacataaaattgttttattcttagttttaaaaaacatttgaatgtgtacccttgcttatgcgaagatttatgacctactagtcatagctaaatagtcaacattgtaagagctgatactttttggttcatgtgaggtttggcattcttgcatttatgtacacggatgtcaattgtgtggacttcttctgtatttatgttaactagcttttactgaattgttgaaactaaaaaagttaaaaacgtgcttataaaaaaaggggggggggattatgtccaaagaacccaggagccagtttgaaagggtgtcactgggcaagtctggaaaactatgaacgttgtgataaataatgataatgggtaataatctgttacaggataaaacaagatttattttattctgacctggaaatgagaaaaaatatgccacctactattaatccatatgatataaatgaagaaacaaatggtgaaagggagaaagctcttctttacaggagtatgtgatctaataaataagaataaagtttttttaaaaatcactattttgtaactattaatcatatctgatccaagagaaaactatcaatgacttctgaaactagcaggtgaataatttgtgagaagcacaatatttatatcctctccaggtggaccataaaatcatggcttgcctctatttctacagtgctttccctctgcccacagtgcagaacccaaacttcataacgtggttgcctttcctagcgtatctttttttttctttttgagacagagtctctctctgttgccccagctggagcgcagtggttcgatctcggatcactgcaatctccgcctcccgtgttcaagcgattctcctgcttcagcctcccaagtagctgggattataggcacgtgccaccacacccggctaatttttgtgattttagtcgggacgaggtttcaccatgttggccagactggtcaagtgatttggccgcctcagcctcccaaagtgctgggattataagcatgagccaccatgcccggcccctagtgtatctctgtgttcctccctttgctcactgacctcagccacaagggccatccattatctcagaggtaccaagggctccctgctcaggtccttcacactcattggctacaactggtattccccagctacatcacaccttccatgtctcagctgaaatgccttatccttgaagaggccattggccctaccatgcaccctgactgaacctgttctttttctttcacatattagctcatgtccagtgtgtatgatttcatgtctattttcccactgcagtgtaagttccatgaaagcaaggataatgtccacctgcctcatcaatgtatactgtggcatattccatggtgcataataaaagcttaataagtacttgttaactgactccagaattcaaacaaaccgatacaaattcctttagaaaaatggtcaaaggacaagatcatgtcctttgcagggacatggatggagctggaagccattatcctaagcaaactaacacaggaacggaaaaccaaatactgcatgttctcacttataagtgggagctaaatgaggacacatggacacacagagcgggacaacacacatgggcctttcagagaatggaaggttgggcggagggagagaatcaggaacagtaactaatgagtactaggcttaatacctgggtgatgaaataatctgtaaacaaacccccatgacacaagtttacctatttaacaaacctgcacttatactcctgaagttaaaaaaaattttaaatattaaaattaaaattaataaaaaaagaaaaatggtcaaaagatacagacatctttccaaagacaaaatactttccttaggaaccaccatatttgtactcagtctagccctataatccaggttgaatttttaaagtgtttcaggaggaaggagcagccacctttgtcaaatgctgctgacgagctgaggaaaacaacacgtaagacataagctttgaaggtagcaacctgcagggaagatcttctaagacaaagggccacttccagcggacctgatacctgcagtggctgctcccttcccaatgatacctcactcacctggacacaggcctccagacaccactctctccaccatccagggctctttgccttgctctaggaaggagatcacatcaggtttggaaacggcaagacctggagatgagaagaaacatgccacctggttatggtgtgggggccccagaattcagatccaggacctggtcatcaagcaggagaggcagttgcaggaagtgccagaggaagatgggacagttgcctgggggtagggggatgcagcttcagccgacagcgccgccctttaacccctcaaaaatgaccaaccaatcataagactgaaaagcacccaaaaactgaccaggaaggaacatgcccaaggataacctccaaactaacagacgagatcaccttacccagtgagaccaggttgctgtaggtctccaacatcacgtctctgtacaaatccctctgagcaggtgccaaccactgccattcttcttgggagaagactatggccacatccctgaacaattctgacccctggaatgacaggcatgtatgatatatatgtatttcaatggttcacagtgggatgaaaggagatggggcaggtctttgcgggagggggggttgttttgttgaacaagaagggtgggactgaatgtgaaaggtgacagaagaaatggggatgagtaaaacagaatgatcaaattgttctcaaacattccttttaactgcaaatcaatgctctgtgtacaggtctgggatgaaaattaaaatcaagctaaatggagttttccttattgttaagaaacagtgtaataaagcacactgcccactctatacttggcatacaataaattctcaaggtgagacctatcacttctatcttttggaataacaataacaacaaaaaatatttctgatggattttccccaaatattttattttttaaaattatggaaacatgttttctatcttagatacaggattttcatgtaagtcaagaatttcttggagatgaaagttcatcattatgttggaacataacacaagcatttttcttcatgggaaaaaccatggagataacttttattgagtgcacaattttctatcaagtgaaacaactgactcaaacatcctcttattttggatcccgaggttggatcagatctctaaggcttttccaagccctgaccactcacccacctagatgatcatctcacttgctacatcgctcaccatcctcagctctgtacttttcttcctcttaagctaaagaaactaatggaggatgtcccagattcaaatgctctgtccaacgtcaaactagactttaattctggcatcaaatttttgatggattcccagccaaacctcaattacatatccaatcattaatcattcccaaagcaggacactgtaccatgcgctgaaactgaaaccaaccaacaccacctcccctgcttttctatatgtgattgctcctaagcattcattccatctcttcaaacttcagttcttacaaaggatgctctcatttcatacagggaaatgagtttctcctcctagcagacgaaaaccatcaggagatgcagaatgctatagagaataaatctgtgggcatttgtcagaggggagaggacaatgggagaggagactcctgcctggtccttttattccctaaaatgggaaagtctgagaaccaaatttctggatggaacccaggtggaaagtttcaagataaggaaagcaaatatttatgggatttaaaaactcacaagggacatgacttttagaatttcaagggctgataggtcctccttctggttcctctcttggggaagggcagagtcctgcgacggtagagctgggggaggaaagagcaaacatgagaggctaggcttgcctcacagttcctagaatgccaagttacaagtccccacctgcttgccctctgcccaccaagaaaatgagaaggagggggaggcaaagggatcctcacccaaccccaggaaaccagctttagctgctgcaaggcaaaggggaaccagtggtcctttccctcccatttcccctaaacatccagtggttctgttttgctgcaaatgcaagtctaagacagggatgctgagggctgttctagtgactgagacccacatgttacctcaaggacaaggagggcttccctcaagccagggagcatagaaggcctgcatcatttgcatagccccagcctagaataaagcctttccaggactaggccatttaactctctcctgcagcaaatataacacctttgaaagtctacctggctcttttcccaaccgccaaatatacaaaaagctctacagcccaaactgaggctttgtgcatgccacttcatggagcatgccttgcatcaacaaatgggatagagttggaaggaacagtaagagacaaattacacacagcacgcccagtgctccattatcagcacataaatgtgtccttccatagagacacagcagtgcacaaagctgcatgtccaataatatttgctaaataggagaactgaaaattagtacgtaagtaggcaagtccacaagtagccaagaggttgaatcatttttggcacagccatataatgggatgccaagtgactatcaaaaatgactatcaaaaactgacaagcaaagatattaactactgaatcctttgagaacattcagcaaaaagaagtcaaactcactaacacacaggctaaaaacaaaacaaaacaaaaaaattggaagaaaaaacacccaagtattcgcagtgttgtcatttaaccagttcttgagctcactgttaaacaagaagtactctgtaaaggagtatataaggtgcctactgcattacaaacatttggttctaagtaacgtgtaagtgaaataattatgaatgttgcttaatatgatgtaataggcagcttttccttattatgaccacttttataagcattatttgtattaactgcacgatatcctatttacaaaggatggcctgtgatccactcaagtgtttccccattgctggacatagaatttgaacatataaaatgttcccaagtataagtttttctaaactagcggttctaagtcttctggggtcttgtaactctctgagaacctcatgaaacaagatttcctctcagattaaaaaaaaaaaaaggcacgcataacagtgaatgcaaaacatccgcaatttcagggggtcggagacccctgcgcacccacctaaggggtccatgcacctgggctatgaggctggaagcagaaagggggcgccagaaagcgcacgccgcgagggccggcgggaaatgtagtctcacgccggtaaagccacagagcgacgatgaggcgagacgtctgcgttcttctcaggcctgagacccaaccggcccgggcaccagctcctgctggaccccagagcgcctggaaagctccggaacctctcacctgccgcctcctcgggtccaagtgccaccgcggccgcgcccccggcagcccagggcgcgcttccaccacggtaccggtggattcgccgtgcgcagccggaagatggcgcagacgcacaaagcacaccgatgctgcgccatgatagggccggcgccgcagtgtcttccgggaaacatagtctttaggcgtaaaggcagcagcccggccttgaagccggatctcgcgatgtttcagggtgagccggacgcaggcgtgcctgcgcagtgcgcggaggagtgctgttcgtgtgttcgagtccctgggttgcttcctggggtctgtggtgctgggtgtgctatctgcgtgtgattctctagcgagagattgtgggcgagtgaccgagtgggcaaggggccgtcactgtgtgtgcgtgattttgacagtgtgtggtggtagcttctgactccgcgtgggtcgttgaatgtatgactgggaccgtttagcggtggatacacaactgtgtgcggctgtggaagattgcctcatccgttacgttcccatttccgtggaacaacagttttaccagaaggtttcgaaggaaccttaaagtttggaagcgtaagagtttatctggtaactaattttaaacattacatctatggtgagttaaatgtgggttatgaaggagaacgcaaaataaaaacgttataaagatgtaaaggagttttatggggcggcatctcttgggcaaatatcagaccgccgtaggtagttgttaattctctcttgtttttaggcggctttggtgtcatcaaatgtgagaagccctggactttacacatcccgagccagtgtgatccagtatgattgggagtccgagtgccagatgccggtcaggacctgttatgctgggtctcagaatgcggaaactctccctgtccgaggtggaacagtttgtccttgagtgaggactggagtcctgagtgactcttttgatttgatcctgtttccctcaaacctggtgagctctatggtgtaataaatggttaagagtgtgaacccttaaccatctctaagactggagccagaatgcctgaactccagtcttagagatgtgcctcggtctccacatttgaaagtgaggatgattgtggcatctaattcattgagttgttggggaggagtaactgatatgtaaaataatgctactgctgctggataaggatgctaatatgactgaagctaatgctttctttctgcaaagatgctttttccaaaacacaccatattgcctctttacacattcttcaggagagggtagaggctgcattttccttgtaggtgcggtgatgtggtggaaagcacacttttagaattagacagatgtggattcaaatagcatttcagccatttattagtttcttcgtgcctatctcggttttgttttgtttttttttttttgtccataaaaggaagaatgtaatgctgggcttgcagctttgtcctgagggtcaaataaaatgatttaataatataagcaaagctcagaggttggttattgctgattactgatattaaaagacaacttcagcaaggatggttgaatttcacacttgtgagcggacagttgaggagacagttgtagatttatcctacttgaccttatttgtggttcaagacagtgttgcgagttcaagaggagagggtagatgcaaaaagtcatcatctttcctatgttctctgatcttgggaaggggcgagtggctctagtttccctttaacatcccactgtgttgagtgtgtctatatgtacatgcgtcagtatttgcttatggaggaaaggaaggaaaaagaccaaacaggtacaaagccagccatctctcaggctaactttcttctataccatttttactttctcacattcattaatctgccaaagagaaatttagaggatgatgaaatggccacttctgactctgaaccaagcctctgaagtcatacaccattatactcttggtcacaaaatcagctgtgagtctaagtaggtggaggctacacaagagtataagtactaggaggcagggatcattcagggtcgtcttagagggtggcttccagtttcttccttttaagagtatgagaatgctctgagctagcctctccattccatggaatccataggtcttttgtcagccacttcccagtacacattcctgtgccaaagcacatgcagagtttgtagggtccagccccacagggtcggttggtttctccccgtgtgcggagacgagagattgtagaaataaagacgcaagacagagataaaagaaaagacagctgggcccaggggaccactaccaccaagacgcggagactggtagtggccccgaatgccaggctgcgctgatatttattggatacaagacaaaggggcaggataaggagtgtgagccatctccaatgataggtaaggccacatgggtcacatgtccactggacagggggccctttcctgcctggcagccgaggcagagagagagaggagaaagagagagagagcttacaccattatttctacttattagagacttagtactttcactggtttgctactgctaactaaacggcagagccaggtgtacaggatggaacatgaaggtggactaggagcgtgaccactgaagcacagcatcacagggagacggttaggcctccggataactgcaggtgggcctgaggccctccacaagtggtggaggagtagagtcttctctaaactcccccggggaaagggagactccctttcccggtccgctacgtagcaggtgtttttccttgacactaacactactgctagaccacggtccgcttggcaacgggcatcttcccagatgctggcatcaccgctagaccaaggagccctctggtggccctgtctgggcataacagaaggctcgcactcttgtcttctggtcacttctcactatgtctcctcagctcctatctctatatggcctggcttttcccaggttatgattatagagtgaggattattataatttggaataaagagtaattgctaccaactaatgattaatgatattcatatataatcatatctaagatctatatctggtataactattcttgttttatattttattatactggaacagctcgtgtcctcggtctcttgccttggcacctgggtggcttgccgcccacagagttactccagcagctccctctcctgttatccccagccatatccgtgcttctgccagattccttctgtttcaggatcacccattatcacttgaatgagatcaactgtggggaggtgggccatattctgttgtgcatagtaatccaagcaaggaatcacacaacaaagtgggttctaacccaatcttagctacttactccctgagtgaccttgggcacctcccccaatttttctgacctaaaatctgtgcattataataataataaatttccacggaggaagtataaccttttcaacaaacagtgctggagcaactggacatccatagccaaaaaagaaaaaggataaaaggcttttctgcagtactaatccaggagaaaaataaatgtattgcatcttccttgtgacaactgaggacaaaatacatgtggcctctctctgaggacttttttttttaagagacaaggtctcactctgtcacccaagctggtgtgcagtggtgttcctggactgaactgaaggtcaggctgcttattctcgcagccctataacaagatgctgatgaactgtgaaagaagagagttttatttctgtaaccgggtacagggagagggccagaaaaatattgccagaccaactcaaaattacaaagttttccagtgcttatctaccttctaagctatatgtctacatgttagtgtgcattcatctaaagacacaagtgattaatttcttctaatctataactaaggtctgagttatagaccttggggacattcctctggagcctcagtgattttacttactctagatgggtccaagtgccaaaggtaattaccttatcttgtctcctactaagttatggaggtctggagagttcctttagacccccaataaaacttgtttaatcctaaatggatcctggtatgaggagtgtgaccattccttcattattttgtcatgcttcaaatcatcagcctttgtgttagggcgctggctctctcagcctttaatatttaacctaaccatttagtcaatgctagaacagttcttatggaggcctgcctgttcagtttttgtgagatctggcttgccacagtggcacaaacggcttactgcagcctcaacttcctgggcttaagcgatcctcctacctcagcctcccaagtagctgagaacacaggtgcgtaccaccacaccagctaatttttcttttctttttttttttctgtagagatgggagcctcactgtattgcccaggctggtcttgaactccggagctcaagtgatcgtcttgcttcagccttgcaaaatgatggtgaagctgcatcattgtctggggtaaatacctgaggttcgttgtctcacgccaagggaatcaaggacgtggacacacaagaagtgagtttaagagcggaggtttaataggcgaaagagaaaagagaatagctctagctcctgcagagagaaaagggctcccaagtaggacttccagtccgtggcgaagggcacggggtttatagactggcttcaggaggtggtgtctgatttacgtaggccccaaagattggttggaccaggtgtgccaatcagaagctggctgccccaccctaatcttttattatgcagatggagtccctgtctgaccgggccatgttgtatgttccttgctgtacacgtggttgacaaagaaaagggaagatggagctgcgatgttggacatgcctggcccccaggtagctttttcctattggcacagctgctggcattcacccgtgcaaacttccagcttgcttatctatgtctgcagcttgatttttcaggctgctgtttgttagaaaagaaatgacttgggggctgcttttcattaaaaggaaaaccttaccggggatttccttaccctcactatctgcctaaataatttctttttaactcctatgtcacttgggattacaggcatgagccgctgtgcctgctagagggttttttatctttattcctcaagattttgcatttagataattatgttaaacttgggtgtgctaggtagacatacgtctgctgattacctgtttaggaagaatgtggattcgtacgtagggaaaaggagtcaggctggtgggaccaggggaaagcaaagagataaagcaaataagctatagatctgcattttcttcatggtccaggatatataaacaaaaaaaggaagcagataagctataggcttgcttttctttatgacccaggacatacagccctgccgagcaaataatgaacgtaactcacaaacttcctgcttatcatcaaacgcacgcatccacttatcatcaaacacctcgggtgacagaagaatgcaggtcagctccctgctgccttggcattatcaatcagcccaggaaccatcctataaaatctccagcaagcctttgtttccttgcagtcagctcctcttccactgattctgcctgttgctccctgataacatactttgatactgtctttaataaatctgcctttcttcacccacagctgtcttggtaagttcttttacctctgtgccaccagcccaaacagttgctgctcacctgaaacaaagaataaatgtggtttttaagcaaatcaaagtttacttagtgactcttaccaagctttgtagaaggttgtgccaaaaggagaagcttaagagataacggctaaaaataaaaaatgttaccaccgcccaaggggttcttcctgcccactgcataaagaaagaccatggcattgtagtagagaaagaggttaatagacatgaggctggccacgccacatgggaaatggagttcgtactcaaatcatctaatccaaagctcttatcttagaggtttttcaaagtcactttgggggaaggggtgggagtggccagataacaggtgcttgctgctgattcgttgggctggagatgaaatcatagggggtcaaagctctccttgtgtggggtgaattgcttctgggtggtgccacaggaactgggttggttagtccaagtggaaccatcaggtccaggtggagccatgggtgtcagacatgaaaaaacctgaaaagatatctcaaaaggccaatctgaggttctacagtagtgatgtcatttgtagtagtaattgggaaagttgcatatcctataacctttggaataatggctgacagttgaataatgctgccaccttagcaggacccagactcctctcctcccagactgatggcctcccattagctttacaaaaacaattgagttttgggcaaagcctgttatttaaactatagcgtaaatgtcttccaaagttagctcagccctatagcccaggaataattaagggaaaggcaagataggtgggttagctcagtttactataataatttttctcactgatacagtttttgcaaaggtggtttcataaagatgcctactctcttcacacatttgtgaaatgtcgaaaagactgcaaaaacctggacgtttactgatgccttattttaaacaaggcttgtctggtttgaaaaagtgaggggaagctatcaatcataattttgttaaatacagtgagttctaagtttctcctcaaagaatctgtgtcagtatgttcagttctttgttttccattttaaagtttaacttcctcattctcttcatctccttgcccctagtttcagtaaacaacctccctgccagttctgatcagtagttcacatctgttctcctggtcacttgctccatcctgagacccctggtcacccgctctaacctaagtcacctttagtcacctattccgtaaccgtctttcctgccacaactgctcaccccaccactgtagctcttaacccctgctgtctttaaaatagccaatcggaattagcttagactgtgcagtccaaccctagccaataggggaacgatgcaacagtaggggctacctgtgtcagggataagaaccccttcccctcccttgttcaggtgtgctctcaccattgttccatccacaagatgcacccttctgtagaagtaaaattgccttgctgagaaaatttctgttcgaatgctatttcttttgtggcaccgaaaatttatttctaacaatttcaacactcaaacacaacccaactacaatttttgtggattatgttccttttactttttaggaacagttttccaatgttgcagtcataatgcaattttatcagctttgttcctcctttaagaaaccttaatacaagaagtatttttacatgttgcttcattgccatgcaattattcgtttaaaaagttgtatagttttcaatcagatagatgtgaaagg[155 bp omitted]attaagtgggtgtggtggtgtgcacctgtaataccagctactctactcgggaggctgaggcaggagaatagcttgaacccgggaggcgga[131 bp omitted]tgtcaggcaaggctgcctctcatttgattcctaaatacaatagctataaagattaaaagctacatacctccctcacaatttgcccacaaggaaattccttttggacaaaggacagaaagaattcaaagtcatccctctgaggctcacctgagagaaatgcatatctgattgcttccttggacctagtgtttatgtaaaaatgcaaattcacagagccagactaaattgtgtattcagtggaaagctaatcaataactcaaaagaatgcaaccttttgtcccacatctatttatgacctggaagcctccacctcagatttttccaccttacctgactgaaccactgtacatcttacacatagtgattgatgtctcatatctccctaagatgtataaaagcaagctgtaccccaaccaccttgggcacatgtcatcagaacgtcctgagactgtcagtgcttccctaaccatgggaaaataaactttccaaatcgattgagacctgtctccaataccttttggtttacaacatactgttatttatttgaccattcttctacttgtagctgtggagtcctgataagtaagcaacaatgaggaaggggccccagtggggaagtacaatgaacagttgtcctgagaaatggctaatcaaacaacagctctctccaggatgaccctataaaacttccttccagctcctgcctctttgcagacagctccttctctcctgtgctgccagttgcaaccttgcaatgtattttcatacgttctctaataaatctgcctttctttaggactgtcctggtaaatatgagactgttttctttaccgcctttgatacaagccctatctagttgctacccatgacagtaggtatattgtttatgttcaacattttattataaacaatgtttcagctgggctcggtggctcatgcctgtaatcccagcactttgggaggc[135 bp omitted]gaggcaggagaatggcatgaacctgggaggtggagcttgcagtgagctgagattgcgccactgcactccagcctgggtgacagagcaagactccgtctcaaaaaaaagtttcagttagtattttttgctgatatcatagttgcgtttgtttaatttcctcaaataaaattcccagcttatatgatgctctttgtcactggcaactttggtcagacaattaaatgaagcaattgaagggcacaacaggattttggaagggatggtacaggattgggagataaactagagataggagtttataaaatattttcaaagacagattgaagaataggaataagagtatgatattgtgaaatatatatttgatcttcctagcatagaacttctaaaatccttagaaactacaaagtaacagtaaaaactcattttgtatgctaatgagttgacagctggcaacccctatagagtttcaggatggggactggttatggaaagaccaagacatgactagaaggttgggacattcaaccccacccccaaccctaaggaggggacgggattttaatcaaccatgcctatgtaatgaagcctctgtaaaactcccaaaagacagggtttagagagcttccacccagctgaacatgtggaggttactggaaggtgcaacacccttttttctgtactttgccctacgcatctcttcatctatatcatttgtaatatcctttataataaactagtaaacataagtgtttcctgagttccgtgagccactctagcaaaatatcgaaccgcaaagagggggtggtgaaaatcccaatttgaaggtggtggagtcagatgttccagaggctagactttagtgggaagtgggaagggggaggcaggcttggggactgagccctcagcgaatggtgtctgacccatctccaagtagacggcgtcggaattaaactggaggacacccagctggtgcccgctgcagaactcactgaactcattgcttgcttgagatgtgtgggaaactcccctatatttggtcagaaaagtcttctgttatgattagttgtcgttgagataatagaaaaaaatgcaccttgcgttttttccactgattcagagggcataactgaaagaatgaagaactgaaagaatgatcttaatactctgcttcgcttttcttgataatacgcattacttcccaatatgcatcagtgtcctttattattaattttttcctattgaattcctcccgcattagaatgctgctccatgaggtggggattttgtctgcttgttcactgctgtgtgcccagggcccacgacagtgcccgatacagcaggcgctcaataagtggcgaatgaaagacagggcaaggcggagagagaagaaacagaaagggaaagagaaagcccgggccgccagagcgcttaatcacacgtacatcctaccgggcccctctccagctggctcaggctccacactggtcctccagctcccttttctcagcgatggactcacagccccacccggagcgctggagcgcggacgcggtcactgcgcgtgcgcctcaccgcgctggcaccccggcctggcagcctttggggacctgaaccagctgcgcctgcgcaggtggaacgggtggaacgggtgggggagcggacagtcgaacggcctgagagggctcagctggtccgggtgggattctgaaggccagcggaggtgggcttactagggaaaggggcgcagcagtaactacccgcaactgagcggcgggatctgcggccgcccggggccctcggccaacatcccagcatcctctgcgccgcgccggccccggactccatttcccagcggcccctgcggcctgccctagggctgcggcgcctttgtgagcgcggccgccggccaggatcgagccctggcccgggccctggcccagccccggcctccaaggaccgcgccgaaggaggtgcccactggagggaggaggcggtgaggagcgcgggatggagctgacgccgggagcggccatgccaccatgtgtgggaccgtgtgtgacagtgtgtgagaatgtgtgagacattaaggaaccgtgtgtgacaatgtgtttgacagtgtggaatcgtgtgtgagaccatgtgtgactgtgtgagaatttgagaccgtgtgtgacagtgtgagaatgtgaggccgtgtgtgaatatgtgtgtcagtgtgagaccatgtgggacaaatgtgggactatgtgtgacagtatgagactgggtgtgagaatgtgtgcgacagtatgagaccgttgccccggtgtatgcgggagcctttgacagtatatgggaccgtgtgggactgtgtgacactgtatgtgcttaagaccacgtcaccatgtgtgagactgggaatgtgtgacagtgttaaactgtcattatgtgtagaccacgtgtgaacagtgtgtaagaccatgtcactgtgtgtgtgacctgtgtgtgtgggataatgtaagactgtgtgacagtgtgtgtgactttgtgaacagagcttgaccgtgtgtgtaggattagatgagactgtgacagtatgtgagaccatgtcaccgtgtgtgaggctatgtgtggttgtgtacggtgtgtggctgttgatatgggaccacatgaaactgcgacagaatttgtgtgacagtgtgtgagactgtgtcactgtatgtgaaactgtatgtgaacagagtttttgttgttggactaagattgtatgtgacagtgtttgagattgtgcatgacagtgtgtgtgattatgtgagactgagggagatggtgtgacttagcactgtatgtcatcccgacagtgagtgtgacagtgtgactgagaatggccttatatgacccattgtgagagcagggcgggctacaatgtgggggcatgtccataggttgccaggggaggtgccagaatgagaaactatgtggtttgttgtctgtgatttgtgtgggcaggaagctgtgtgggtgcttggagatgctggtgtgctctggggtttgggagactgctgttgtggtggagagacagaaagattgagataaaggggaaaagatggagaaagggagggacgagagctgaaaagggagagacagacaggagcctcagccttaagcctgaaaagctgaccacgctggctgcttgtcctctggcacagtagtttttccatccctctcagtctctgggggcacgtgaggaatttaaaaggaaaaaggaatgggagacctaccatgtgctggttatgaaaataaatgacagaaagatgaaaattaagcactgtgctcaatgctttatgtagatcatttcagaatcctcccaacaattgatagggaatagttaccatttcactgatagagaaacaggtttgcagtggttacctaacttgccagaggttgtataggtagcatgtggtggtttggctgtttgagaccaggtgttctgatccttaagcctagtagttcttaccactgagttatgccacttcataggtaatggctttattcttcaaggcagtgaggtctgctggacaagaattcaccatagggggtttggatgactgttcaagcatagcctgctcctccctccctctctccttctttctgtctgaggagattgcccagaaaagtcaagagattagttttcagttgtgggttgtcataagccaggaccagaagtaggccgtcttgactctttgatcgagtgtccaccacactacatggaccctctgatactcactctgtgtatagagatgctttctctgagaaatttcactttgtagctttatctgtcatccttgcagaaagggtgggaacatatttcctttcaacatcatgatcgggtggaaagaattaaaagttagaactggtttccagtttggcttaattattaccatgatgccttgaataattactccgatgaagagccttcatgtgtgaaagagggggaaatccttgcttggtaataccattctgtaattgctgtttttgtttt[140 bp omitted]ctcctgggttcacgccattctcctgcctcctcagtagctgggactacaggcgcccgccaccacacctggctaattttgtgtattttttagtagagacggggtt[145 bp omitted]attgtaaatttagatataaatgaattgctcagtgatacctctaatttactcctgaggttggggaaagaaggagaaagagaaggaaaggtttctaggctgatgatactgagagctgcagggcaggcctggcattttatggtttcttttccttctccagctcgactttctcaggatactgtccctctcccacagaggagctgaaggagtaggacagaagaactgtcaaattctggaatccttaaagccatgtccaaggtaaggaagcatttcttctctcttccctaaaatgccatcttattttttaggttatacgaacattttgtttttcttccaaaattctgcaacctaataaggttccattcatccagtgactcgttcctcatatcttgctttccagtaaaagtctccaaaagcctagttatctttttttccacagccagcatttttatcttcactcaagaaatagttcagcaccttctctgggtttagtgtctgttagaagctttcaagatgcaaaaatacactcattggcatatgtaaaccttcattgtagtaagttgattgagactgaggtgtatgttcagatgtaaccactagcataaataaagcttttccatagacctaggtttgaaaagaaggcaagacaggagggttatcaggtggtcttagtcacagaacagggcaaagtctcttgctcaaagtgatcttgaggagtgagatgtgttgagtcttgaatattaaagtgtgggtcagctagggcagggatttttccaggcactccgtgggctttgaagaacagtattccagggaataatgaggtaccattttagggacattctgagtgtccacagctatgttattctaggtcatccagttaagattagtggaattaatatgtaaaaaatagcagaactttgttttggaaaagactaatgggagagcacttgaatctgcattaaaataaaagctgtatatgtctataataatgaaaacagttgatagtgtggaatggagccagaagaaacatacaatgttaagaaacaaatccaagtataagaattccataagaatggaaatcttcattcactgaacatatagttattaaaggccttgtgctaattgctgtgataaataaaaataaataaaaataaacaccttgtgccaagtgctgtgataaataggccctgtctttgtcttcatagaatttaatgtatactagtttattatatgatgtactgatattattttaaatcagtgggaaagggatggattattcatctagtaaaaaaaattctctgcacttagagaaaaatacatagaggttaaatgcattgtataggttaaatatatatatatacacacacacacctctaggttaaaatatggaaaatggagaaagagtaaggtgaggcagatgcagaaatcaactagtacagcactgtccaatagaactttctgtgatgattgacaatagaaatgttctatatctgcagtgtttaacatagtagccactagccagatgtggctacaaagacttgtatatactagcatgactgagaaactgaatttttcatgttaattgatttaaatttagccgtatgtagctagtagctagtgtattagacagcacagtcttaggcttataaaacagtaaagccaggaagataattatgggtgatcttgtccaagtttctcattctacagatgaagaaaaagaggccaggggaagaaagtgacatgtccacgtaaccagttagtgactgagtcagatgtaagaagttgtaataaaaattgagggtcagtaatgtcgatgatgatgagtgatgatatgaaaagggtggtagaaaatgatgagggacactgtagcgagtctgtgatggggctcattatttcactcccatgcccagaaccttcattgccttcctatcttacttggaatgaaatccagtgtcctaaccatggcctataaggccctttgtgcttcaggtcctggctttcctagacctcattttctacaagtatttacctctcttcattttaatcacagttgtgaatttgctgtccctcagacttactgtgctttttcttgtctctggacttttgcatttgcccccccatccccctacatgttgacatagcttgctcccccatttcatttagattgttgttcaaaccttacctcttcatttagacttaccttgactatattatctacaataaacagcctatcactcttaatcaccctttaccttcttttgttttttgtggcatatgtcactacctgacatgtatgaccttatgtttaatgtttttctcctttgttagaatattaagaggaggaactttgttttgttcacctttgtattcctgactcttagaatagtgcctggttggtaataggcattcagatgaattccttatctgtgagtgagaccaggatagctagagttagccacctcttctttcctgctactgatttggtaacagaagaaagaaaaagctgaaagtatgatgtgtagaataggtggaacccattagcccaaatgctgtttccaggaccccaccccagacctcctgaatcatggtctcttggtggcacctaagaaaacacatttttattgggtttcccaggatgatgattatctttttttgagatggggtctcactattttgcccaggctggttttgaacttctggcctccagctgtcttcctgcctcagcctcccaagtagccaagtagctgggttacaggtatccaggatgattttaatgcatggtttttgagaacctctgcctttaaagattatatttaaagtatgcctcttgtaagcagcatataactggctagttttaaaaaagctagcctgataatcttaatcttttagtgtttattacatatttaatgtaatacttatacgtacgtgcttaaagctactgtgtttctgtttgttttccatttatcccatctgttcttttttcctttgtttctccttttttgcttttttttggttaagtcaggtatttttccttattattttagtaattatacataatttttattgttcttttagtggcttttctaagataatattcatccattactcatatgtagtaatccttctttcttctgtaatcttcctcctatgattagtacccttatcacttcctgaacaggataagatgcctatggtgatttaactccacaatattcttattgctctatttgtaattactgctttagaactcttaatttcttcctgtgttttcatgcttccattttccttctgtattactaatacctgaagaactcttcgagtatgtcttcgagtgcaagccaacactttactcccaccctgaattgttttttcaattcaaaaacaatttgaccgtatcgttgctgggtcaaaatagtgtaattaaaaatttttttgaggttaagtaattttgtgaaatcctggtctcaatggagagaatgacgtctgtgaatcgattttaagaaaataattca[133 bp omitted]ccaacatggtgaaaccccatctctactaaaaatacaaaaaaattagctgagcgtggtggtgggcccctgtaatcccagctacttgggaagctgaggcaggagaattgcttgaacatgggaggtggaggttgctgtgagccaagatcgcaccactgctctccagcctgggcgacagagcaagactccatgtcaaaaacacaaacagcaacaacaacaaaaattaagatttacccaactgaaaataagcatgggggttagtaaataagatagggcataattatactgtataatagtactcagccaataaaagtgacattatcagtaagtgaaatatatacataatcatagacattagtataaggaaccgtttgagcagattatactaactataaattataattgcttttaggaggtagggtgacatgggagtaggcatgggggtgaaagacttccaattctttaacttaaaaagggaaaaaattggctgggtgaggtggctcacccctgtaatcaatcccagcatcctagcactttgggaggcccaggcaggaggatcccttcagcccaggagtttgagaccagcctgggcaacatagtgagacatcatctgtaccaaaaaaaaaaaaaaaattacctgtgcctggtgatgagtgcctgtggtcccagctgcttgagaggctgaggttgggaggatcattcaagcctgacaggttgagactgcaatcagccatgattgtgacactgtactccagccttggcgacagagcaagatccggtctcccaaaaaataaaattaaaacaaaggagtggggggaaatcactgagggtagaaatactggaaagtatattttaagtttctttaatgatggcaatattttaaattaaatcaaagtaaatataaaaaaatgtacaaggtattcatggtctcattggctgacaggaaaatgtcagatagttaaaacacagactctattagttcatgtgtgcagctaaaaaatgtctcaaggacttcatgtagcaaaagctgcttcgctaatgtctacagaataaatgatgtgtgtggaacactttcccgcacaaaattttaaagagtttgtattgaagtatttgagttacagtagaattgatgattagcagcgcccaggcctatccagcacgagttttaatttttagacctgattcacattcttttccttctttgaagctacaagtcacttcctcagatttccttgtattaagaaatgtttcagagatagaagctttttaagcagctgatgcgtgtaattgatatttcttggagccatacttttgcttcctttatagataacctccttaacatttttgtgcatttttccggcagtagcaattaacattgactcatttttttttccattaaaaaggtttctaaataaaatcactgatgtatttgagtatttcttcaataggagcattactctgcaaagagtcatataagagtaggggtgatgttcatatttgacaaccaacaaggcaaaggcacacagcagaacttatcctagctgggatcctggagtttgctgccatgctgggcattaatcttcagttgctgaattccttatggagaaatctggtgtggtcactagcagcactcagtgaagtagctgtttatcaatgagtgtggcagtatttcagtatttaagaaatcagtatgttcaggtgtgtaccattgaatgccatctctatgtcagcccagcttaagagcaggctctgtgacatgtcaaaaccaagatgcatatgcctaaccatacaacaagccctgataagtcttgagctgatttatcttgttaggaagaagacccatttttaatttttagggagcaaactaggtcttgttccgtgttatcttaaagatccttaattcaacattcggtagtattatttgggagctgtactgtaacatttttaaaactctcttgctcatcaaacaggcacaattgtgtatgtttctctagtgagagctgtagatattttttgatgcattttattatcagacttggagacattcactaagtaaattaatagtgcttaaattactattattttgtctcatgtagcatgattataagttaccaactatctttacaacttagtggggttatcaagagctgttaggcaatcatttgtcgcctcttacacacagtctcaggaaaatttttatttccaatgaacatttgtcccatattgaagtaacttttattgtacttctttgattccttcttatcaagtactgattatacagattcaaacatttattgtaatatcactcttcttcttctcaagacattagaagtcatagtctttgagatcaacttcattttatctgtgacaaattttttcttgttttgattcagatacctttttgtttgtttgtctttagaaacggggtctcactatattgcccaggctggactcaagcatcccaggcaatccttctgcctcagcctcttgagtacctggggctttaggcatgcaccaccacacctggcctgattcagataccttttgtgacaccaagctgctggtcatctaaaccatatgccttccattcatttaaaccatctacaggagaggaatttgtgtaaaacaaatgtttaaaattcaacacacacaagacctaggttgtcattgtgaaatgtgtaatatgaaatgtaaaaaatacgtgagataccttaggtcatcagtgagatgagatgcatcactttgacagctggttggcaaatgttgtctttgccaccaagcacaaattcagtggcatactttcacacatcaggtgatctgtcactcagcttcttgattgctctctgttatggtatacatttaagccatatttttgcaagtcagtatataactttgtttactgtttctattatatatttaattttggaaagtcaatataagcatcaaacatatttatatatatttttatacaaccttattgatgtctctggaacattgaccattccattgtactgagtttggaaaaatgccagattcaaccatgtacacattataaagcttagcctgtttcctcctcgaagctctttactgccccggtgtatctgattttccaatattgagaaatgctctggcatttagtatgaataacatattttatactttatttacagtgttctgttgttttccaattttgtgtgtgtgataaatcctttctctaccagtaggattatctctcaaattgtatactttccatgacagaatatcaaaacaaagcacaaagaagtcatttagcaattacctgacatgtgttgctcagaacctaagatactgtcagaaagttttgctatgtgcaatatttttctctaaaagtatagacaatttaactttttaacttaggctcatgtgaggatatgaacactagttgagcaagaatgtgtttatgtcatttcaggatttggtgacatttggggatgtggctgtaaatttctctcaagaggaatgggaatggctgaaccctgctcagaggaatttgtacaggaaagtgatgttggagaactacaggagcttggtatcattgggtaaggacatgtccccttaattcagaatctgtacatgggactgagctccaatgtaatatttgggaaacctctgacgtgcttcactaaatttccttttcttgtgcttcccaaaataggttgaatttgtagaattggcagcttcatcttccccattcttattcctcagctccctcccattattctcccaccttcttgatgatgcagaaacttgatcttatttatagacctgcctaattccccttttgttttttgtaagcaggagtttctgtttctaagccagatgtgatctcattattggagcaaggaaaagagccctggatggtgaagaaggagggaacaagaggcccatgccctggtgagtgagagagaaatagggagacagaagccattgccaggaaaagctcagcaattctgaaagatttcagttcataattgacgtttcctgggtagctcttcttaaagactcaaagcctgggaagaaatattgaggcatctttagtatgagctcctcaatttgttctctctgtctatattctctcacaagttacagtcttctctgacagtaatcttctctgataacccattttcctattgttggatccagatgtcacagcatctccctgtccttgccttttagttttatacaagttgcttggtttcattttttaaaaatccaggtgcctgtaatcccagctctttgggaaaccagagtgggtggatcacttgagcccaggagttcgagaccagcctgggcaacatggcaaaactaaaaatacaaaaaaaaaaaaaaaaaaaaaattagccaggcctggtggcacgcgcctgtaatcccatctatgtgggaggctgaggtgggaggatcacctgagcctgtgatctgagatcgcgcccctgcactccagcctaggtaacaaagcaagagcctgtctaaaaaaaaaaaaagccaggttatttttgtttgttttgttttgtttttccctttctcagttactcattccttttagattgaaggattgatgcatttatttatttatttattcttttaccaagcctcattgactttatgttttgagaagaggattctgctaaattcttgggattattcagaggcttatacaccaacaaagaaaaaagaaagccaattttattttcaattctgggtaactagaagatgataacacttaatagaaacaatcagaagcaaaagttgataggaggaaagatgaaaaatttggctgtggacataagagggttatatatataagatgaggagagttccaagcaaagaaatgcaacatgcaactggtttagaagatgggggctcagaaaaatagaatgatttagagatgtcagtgtgaatgaatgagatcactggtcttaagagtttgagagataaagcctgatgctgaggcctttgtggggaagtgaatctttgataactttctcagtatcctccatggtaaatggcatctctataatttgtctttggttaatatatatatatttttagatgaggtcttgacctgttgcccaggctggagtgcagtggtgcactgcaacctccacctcccaggttcaagcaattctcctgcctcagccacccaagtagctgggattacaggcatgcaccactacgcccagctaatttttctgtattttaagtagagatggggtttcaccatgttggccaggctggtcttgaacttgtgacctcaaatgatctgcccacctgggcctcccaaagtgctgggattacaggcatcagccactgcccccagcctgtctttggttaaattttatgcattttaatttttctagataattgtccttttcatttaggttatcagatttcatgaatttgagcaaaataatctacaattagttttcttttatatgtataatggtttccaattttaattttttattttgtg[131 bp omitted]aaaccctgcctctactaaaaatacaaaaattagccaggtgtggtggcaggctcctgtaatcccagctacttaggaggctgaggcagagaatcacttgaactcaggaggtggaggttgcagtgagctgagattgcaccactgaactttagcctgggagacagagtgagactccgtctcaaaaaaaaaaaaaaaaaagaatacatttattaggttgctctactcataaatcagtttatttttaaagaactagcttatggatttatgtattcatattcttttccaattttgtgtttttttctgtactaattcataaaatattttctccttactaattctttccttctaattttcttatttattttgatttccatagtgctgaaatgagagcttaatctattaatttaattcttttatttagtaatgagattattaaggactacgaattttcctctaagtttatctttgtctatctcctgtagattctgatacttagtgtttttgttactgctgttcatactagataatctaccttaaacatttttttctttcacccagagttgtttaaaagagagttttctggttttattgtatttgatcagacagtgtgaaggaattatttacatacagtaaactggatacatataaattgtacagtttgatgacacttgcatatacccatgaaactgtcaccacaatcaagacacatttagtatttctatcaccccaaaagattgcgtgtgtctctttccatctatcctactctccactcccagttccaaacaaacatgaatctgatctttattttttattaatttgcatctaaagtaaatggaatcattcagtatgtattttgttatgtctggcttatttcactcaggataatcatcttgaaatttatctgtattgttgcatgtatgaatgcaacatttcatttatccattcacctggtgatggacatttgggttgtttccagtttggggctattataaataaagttgctatgcagctgtcatgtacaggactttgtgtgaacatatatttttatttttggggggtaaatacttaagatggaagaactgagttatatgataggtatatgtttaactctgttagaaactgtcagttttctgaaggaattataccattcttctagcagtgtatgagacttccagttaatccacattctcaccaaatcttggtatcgtcagtagtatttttaattttagtcattctaaaggttgtattgtggttttaatatgcatttctggaatgactaataatgttgagcctcttttcatatgtttactggccatgcatataacttttatgaaaactttgttcaaacatttttcccatgttttattggattgtttatcttatgatttgtaagagttctgtatatagtcttaaaacaagttctttatcatttatatgtattggcttatatgtatgccaattatggcttgcctttttgtttttctgctgccacctctgttggaggcaaagtttgcagtttttgtaaaatccaatttattaatttgtcttggttggtgcttcttatatctaagaaattcttgctactcccaggtcacagagatatttttctaggagttttaaggttttagcatttatatttagctctgtgaatgattttgagctaatttatgtgtcttgtgtgaggtaaaggttgaggttcatttttttttccatatggatatacagttgccccaagaccctttgtcaggaaagactttcccttcctaattctatcacctatcaccttgctacttttcctgatcattacttgaccacatatgtgtgggtatggttctggaatgtcttctgttccattgatctatatgtctattgtctcaccagttccatactgccttgattactgtagctttgtagtaagttttgataccagatagagcaatttgtaaaattgccttgactgttttagatcatttgcatttcatataaattttagaatgaagttgagaatttctgctcaaaaaacttagatttttgttgggattacattgattctgtatgtcaattgaaaaaaactgacctcttaacattgagtcttctaatataagtatggtttattaagccatttattagtctttaaaaatgtcttgaagttgggtgtaatggtgtgcgctggtaatctcagctacttggggggctgatttggaaggattgcttgagtccagaacttggagactagcctggacaacatagcaagactctgtctgaaaaagaaaaaggaaaaataataaaatttatcttaagaatattttgcagtatccagtgtagtggtactctgttaaattttttttcctaagtctgtaatagttttttgagtgctataataaatagaattttttttaacaattcagttttctaatagtttgccactagtaggcagaaatgtaaattgatttttatattagctttacatcttatgacctcgctagattcatttaatggttgccctcacagttattttgtaggtccatgaggattttttggatggacaatcatgctatctacaaatacagtttttttttccttctgatccttataccttatttttcttgatatattgcaatggctaggacctcctatataatgtgtaattgaaggggtaagaggaaatgtacttgtgctgtttcaatcttaagggaaaacgtattctgtcttttactattaagtcagtgtaagctgtcagtttttcttagatgtccttgatcagtttgaaaacgttactttctattcctggtttgctgataatttttataataaatggatcagatactatttctacatctgttgaaatgatcatgtgattttttttctctttaaccttttaatatggtgaattacattgattgattttcaaatgtgaaaccaatcttgcatttttgggataaactctacttggtcaagatcatgctgttaatattttcctagatttcatttgcacagttttattaaagattttgccttatgtacatgtgctacattggtctgcaggtttactttttttttttttttttttgagatggagtcttgctctgtcaccaggctggagtgcagtggctcaatctcagctcactgcaacctccacctcccgggttcaagcgattctcctgcctcagcctcccgagtagctaggactacaggcatgcgccaccatgcccagctaatttttgtattttttagtagagatggggt[143 bp omitted]tatcaagataatactggccttatgaaaacaagttggaaagtgtttatctttctctattttctgacagtttgaataaaatggtattatttcttctttaaatatttgatagaattcaccaatgaagacatctgggcctgaagtattttttacataacagctttaatggatatagggttaatcaggttatctgatttttgttgaatcagctttggtaggctgtgtctttcaagagatttctgtgtttcatctgagtttttcaatttattaatgtttttaaaaaacagctgtaggctatgtaatgataactcctctggtgttgctgatatctgttctttttttcttgataactgatgttttaaaagaacctacttttgttttatttcctctgttgttgtttttctatattgttaattttctttcttaactttttcttctactttccttaagtttactttggtcttttcctcacttcttgaggtgacatcttagattattgatttttagacttttagttgttttctaacataagcatttgaaaactgtagatttttcctttaagtaccattttagctgtatcccacagattttgatatgttgtactgtcattatcaaccaagatattttctaatttctcttgtatactctgacccatgatttatatagaaatgtgtttagttctcagatgtttggagttgactaggtattattgatttaaaaatcaataacctctaacctctgttgaggttagagagcatactcatcttggtttcggtactttgggatttatggagacttggtttatgccccagaatatagtctatcttatttactgaacacattgtgtgcactcgaatacatgttgtacaagtgtttggtgtagtgttgtataaatataaattagatcaaagtagttaaccctgttgagatcctctttgttactattttttcctagttttgtcagtttctgagcaaagcatgtgttagttgcctattatgactataggattacctatttcttacactttcaatttttgttttatgtattttgaggcgttatattaggtgcacagacattaaagattatttctttctgatgaattgatccttttattactatacgtctctatctttggtaatactcagttttaaagtctattttatctgacgtgaatatagttaatctagccttatgcttactgtttgcatgttacatctttctttatctgtattattaatgtattcttatatgtaatgtgaggtttctataaacagcatataattgtgtctttcattttgttgattcctataagttctgccttttaactgaataaggagttcattaatatttaattatttatataatttgagttgagtctactattgttttctctttaatatttctcattaaaaaatatttgctcatctctatcttcttttgggatgtttgaatattttttataattccattttattttatctgctggcttgttgtacctttttatattatgcttccagtgggtgctatagtgcaatgatgctcaaaatgtcgtcttgagaccagcagcaccacctgtgaatttattagaaacgaagattctcagccctcaacctccactaactcaatcaaaaactctgtgtgtggggtatagcaatctgtagtttagcaagttttatctaattctgatacactctaaaatgtaagaatcatgcctgtaacgattataatatctatccttaacttttcagtctaatgagaattagtgtttttacttccttattatagttttatcaacttaattctgggtttaattagatcattgctccttggcagtcatttcatatttcttttttgacccatcagtcttcagaatttaattttcatgttgactttttatagggcattcatgggtgtgatttgcaactgtttagagaggaaagtggaatttggaagggcactgaggcagcacagcggaattagcagcctcaatttaagtatgttgccttcagattcttttccttccaaatatcattatccactgtaatatttaagtttagtggtaatattccatttggtttcagacatttaccccattcatgcaagcatgtcattctaataagaggatgaattagtgtggtgttttatgtcttattgattcagtatttattccaaagatactaagcaccttctatctgtccaggctattttaggcaatgggtgttcaagggtgagaaaaaaacttcctgcacatgaatgtttacattctaataagaatagagagtaagttaacatgtaatatgatattaaataagttaagtgctatgaagtgcaaagcaggaggaaagagaaacataagagtgtggaatacttcatattggatgttcggcaaaggccatactgaagaggtaatatgtgaacagaacctcaagtgaagaagtgcaatgagagaagggatcaagcagatatctgtggaaagtgcttttcaggcagagaaacagcaagtctggtgctcctaaagtggaaataaagtgaattcccatatgactgaagtggagtaagcaagcaagggagtagtagaagataagatcagagaacaccaggtcatgtagagtttcataaaccaaggtaggaattttcactttattctaaatgtagtaagaaacaggaaaatcttaagcagaaaaatgaagtgatctgatttggaactggacaggggaaggcagactaagttctgtgctaggttagtaagaccaagcagtttgatacaaaactactcttatatgaaggcatcttagctgcagggatcaattgaaagtttacatatggttggagtttgttacatagaaaatgattttctggaagacttttttctaactacagatgtttacccatagagttttatgaacaatatgaacaaccataaagttttacatgtatcctaataaggatattaatactgcctactgttgtttttaggcctgggattccaatggagtttttaatcatattaacatcataaaactggcttataaaagataacttagcttgaatgcaggataacctatgacaagagaggaaaggtgtttgaagtctgttattaacttagatataaaaagatgattatgatttttagaataccaccttcattgttttgttcttatatttaccttactggttgtcaatgattatttccttaatcaactctcttaaattcttattatttataatgtcattattttagaatgcattataagcttttaaatcctttaacttgtgatgtattttattcacgtttttgttttagaaatttcttctagtgaattaaatacaaaagtcatttgtttcttgatatcttttagattgggagtatgtatttaaaaacagtgaattttcatcaaagcaagagacatatgaagaatcatccaaagttgtgacagtgggagcaagacatcttagttatagccttgactatcccagtttgagagaagactgtcaaagtgaggactggtataagaaccagctgggaagtcaagaggtacatcttagtcaattaatcatcactcataaagaaatccttccagaagttcaaaataaagaatataacaaatcttggcaaacattccaccaggatacaatctttgatatacaacagagttttcccaccaaagaaaaagcacataagcatgaaccacaaaagaaaagttaccgaaaaaaatctgttgaaatgaaacataggaaagtctatgtagaaaagaaacttttgaaatgtaatgattgtgagaaagtcttcaaccagagctcatcccttactcttcatcagagaattcatactggagagaaaccctatgcatgtgttgaatgtgggaaaacgttcagccagagtgcaaacttggcgcaacataagagaatacatactggagagaaaccctatgaatgtaaagaatgtaggaaagccttcagccagaatgcacacctggcccaacatcagagagttcatactggagagaaaccttatcagtgtaaagaatgtaaaaaagccttcagccagattgcacacctgactcagcatcagagagttcatactggagagagacctttcgaatgtattgaatgtggaaaggcctttagtaatggttcatttcttgctcagcatcagagaattcatacaggagagaaaccttatgtgtgtaatgtgtgtgggaaagcctttagccatcgtggatacctaattgtacatcagagaattcatactggagagagaccctacgaatgtaaggaatgtaggaaagccttcagccagtatgcacaccttgctcaacatcagagagttcatactggagaaaaaccttatgaatgtaaagtatgtaggaaagccttcagccaaattgcataccttgatcaacatcagagggttcatactggagagaaaccctatgaatgtattgaatgtgggaaggcctttagcaatagttcatcacttgcacaacatcagagaagtcatactggagaaaaaccctatatgtgtaaggaatgtaggaaaacatttagccagaatgcaggccttgctcaacatcagagaattcatactggagagaaaccttatgaatgtaatgtttgtgggaaagcatttagctatagtggatctcttactctacatcagagaattcatactggagaaagaccctatgaatgtaaagattgcaggaaatctttcaggcagcgtgcacatcttgctcatcatgagagaattcatactatggagtcattcttgactctttcctctccctcaccctccacatcaaatcagttgccaagacctgtaggtttcatctcctgaatatttctggaatccacctcttgaatccatttccatcccatcatccttgtccaatgcacattaatatatttgacatgggatactcgagtagctttctaattggtctccttgtactcaccattgtctctgtcagatgtccacattgcaaccaaatttgtatttttaaaaatatgtttaatctcatttctccctcattaaaatccctcagtggcatcccatggtttttaagttaaagcacacattcttcaaaatagcctaaaaacctagcctctaacaccttgttccaggttaccttccaaagtttctatcttgtgtcactatccatctcattctctgaatacttatccaggattaagatacatattccaggatcaaaaagacctgggttccaatctttgcacttccatttcctgccctctaatttgggggcagcagtttgtgctttgtaagcttcagtcttatttatagtgtgggaataataatggttctacctcagaagttaatagaagaatgaaataatgcatgtaaattgctcagcagcgtgcctagcataaagtaattactcaaaccataatgtaaagtaaaaagataaccatactatacatagaaagccaatcatctcagccatgattatctcagaaataaaaagagatgcagcagctcaggactgagagattgtgaagtttttttttttttaggaatggtaggcatttttctaaaagtaggtgaggagggtatctaacagtaggatttacattagagtccatgatatagggtaagatggtggcttgtatcagcattcactggatatttaacagttctaagatgctaatgtcttattttaaaagtctttttttttgagatggagtcttgctctgttgctcaggcttgagtgcagtagtgcaatcttggctcactgcaacctccgcctcctgtgttcaagtgattctcctgcctcagcctcctgagtagctgggattacaggcctgcaccaccacgcccagctaatttttgtatttttagtagagagagggttttgacatgtcggccaggcttttctctaactcctgacgtccggtgatccgcctgccttggcctcccaaagtgctgggattacatgcgtgagctaccgtgcctggcctaaaaagtcatttttaataagacagtttactgagatgtattcatcatttacatgtaaacaaaggcaaaatcgaaattaaaaagaaatcttgaaacaagtcagtaaccaatgatgagtagaaaataaagtataagtttgaacccctgttctaaatctgggtgaatgaattatatcaaatctatgtcatttaaaataataaaggttgttaaattactaaaatttcaaaactagtgaagaaaagaaaccaaaactgtaggtcagttctcataaactggcccacaaacatgtttgattctgtatgcattaagtttaaaatacatatgaataccttcagcagaccatgtgttttccctttctccaacattcaaaccactccctgattctttacatctgacctcttttaatattacttcctgaccccagaattcttttggcatataatcaatgcagtgatcaattcacatgtgactatagatacaaacagaatgacgaaagtttaatggaggatgaaaaagaagacaaataaatattttatcctttatatggtaagacagattcactatcatactgatgtcagtagcccatgaattaatttacagattctacctaacaaaattctaataaattttgtaaggttttaacatgtatgtgtgaacatacatattcatgctgttacacatataaagaaaattataacaaaagtgacctataccatcagtggtttaacagttttggaaaaatttatcgtgctctatacaacaattcattccatatgtgaaagttactttcaagtgctttatctaaatgtggaacaaacagtgattagaggagtctgtgacacactctaatcatggaatgagactggccttcctaaacatgagattcagaagcctccccacctcctgtcaacaagtcatagatttgactgtataagaactttataaagcttttatatgatcaaagatagtaaaagatacaatattttttaaacctaagaatgggagaaaattattgcagcacatataaactatggaattcatatccttaacataaaattgctcataaaaatcccttaggaaatgacgcttttctccagctcatagtcaaaggatatgaagaggcaacaggtgaccaataaatatgtggtaagtactaaatctccctaggatcagaagaaatacagtttaggccaatgaaatactatttttttcaatatcagattaataaaactgcattgaaagcatacaaaaagagatactatgcactaatttaaaagagcatgagtttgtacaaactctggtaggcaatttgtcaacttcagaattttaattgggaaaagtagaattttattttgaagttcaaaaactcggcacacaatgtctttccctccagattctattatacacatagaacaatgtaaatgattcttaaaaaaaaaaaaaaggtgaggcttttgagtggatgaaataattttgtaaaaggcaaaacagggaagagtgttcatgaattgtagcagaagatgctgcatgttatatgcgaatgaccgaagggttttaaaaatggaatctagtctgcccaaaggatccctagagaagttcaggcttggagttggcttatgtacaggctgtggcttctaagaagacatgatgaaaagcctcttgaagcctttgtatgtgaaagttatgtcagtagcccttgccaaaagcctcctcactctcccctctcttgtataagtaaattgaatgggatccttatttcacaccattaacaagtataagttctaactgaataaaaatctaaatgtaaattactaaagcaaaagtattagaaaaaatatagtgggatatgttaacgactttggtgtcagacacgtgtttctaaaatattcaaataccataaaggaaaagattgataaaattgactgtgtcaaaaaatagtgtgctttggctgggtgcggtggttcacacctgtaatcccagcacttcgggagactgaggcaggtggatcatgaggtcatgagttcaaaaccagcctggccaagatggtgaaaccccatctctactaaaaatacaaaaaattagctgggtgtggtggcaggcatctgtgatcccagctacttgagaggctgaggcaggagaatcacttgaaccatgtggcagaggttgcagtgagccaagatcatgccactgcactccagcctgggcgatagagtgagactctgtctcaaaaaaaaaaaaaaattattgtgcttttggccaggcatggtggctcacgcctgtaatcctagcacgttgggaggccgaggcgggtggatcacctgacctcaggagttagagaccagcctgatcaacatggtgaaaccctgtctctactaaaaatacaaaattagctgggtgtggtggggctacctgtaaacccagccacttgggaggctgaggcaggtgaatggcttgatcccaggaagcagagaatgcagtgagctgagatcgcgacattgcactccgacttgggtaacaagagtgaaactcggtctcaacaacaacaaaaattagtgtgcttttaaagaaagttaaaagataagcaacaggaaggaagaaacacataacggacacatgtaagaacacatataagtcaataagtaaaggacaactaagcaagtatataaatgtgcaaagatgagaatggccaaattgtggaagacatacagatgtctaagtctctgcttaacctcattagtattaagttatgcaaatttgctcatttattatttatttattttgtagagatgaagtctcactttgttgctgaggctggtctcaaactcctgggctcaagtggtcctcttccctcagcctcccaaagtgctggaatcacgggtggagagattcaaattgagacagtataataccagatattggtcgtggtgtggagacaggatttctcatcacagctactttagaggcagtgaagtttttaaaatgctcactatagccactttgtagggtacagttagtatttgaaacactgaaaacaacctaaatttctatcagtaaagtaatgactaggagttctatgctggagtttaaaagaatgggctgataatattgatacgaatttgactaaaggacttactggttgaaaatgtaaaaatttcgcatacactattgtatatttaaaaatatattttatttctaatgcatttatagaagtatgcaaatgcttagtgaaagttctgaacagacacccaactgataaatgtttcctctaggaagggactggtattggatgctctggtcaaaggaagatttagtgttatttgtactgtttgaagttttaaacatcaatgtaataattaaaaaaaaaactttaacatgaaaaaattgagtttacaacgaactggacacctagaatgaaaagttggcagtctaagttaaaactcttttttggaatttggagcatctctccttgacttgccagcccttcccaggcatacagataccctggtaacccttccaatttaggcaaacagacctacagtggaaatatacaaaggaccccctggcatttacctatggtaatcaaaccatgtaatacttaaatggcaactgatagctaagtatcatcacttgaagaaaaccaccagcataataaggaccaagagatataattgaatcctgagtggggaaagtcatgtaataacagaagaaaatgaaaaattgattttagcctgcaatttgaaactacaaaataaagggaacaattagataagaactaagaaataaaaaaatacactgtaataaatttaataaaggttagaaagaaaagaaaccttagatgcataaattaaaaagaaaaatgagaaaaagggacatggaaatttacaaggtccaatatcaatgttttgggaaaaatttcacagaaaatataagaatgtatcgaatgactgagaatctttctaaactgaaacaaggcaagcatgttcagcttgggttagctcactgaatgttgtataggatgaactaggaaaaccacaacaggaaaatccagaaatatgcttgtgaaatttcagaatattaaagaagaaaacattctaaaagctttcaaaaatgattaggtcacctaaaaaagaacaacagtcaagatgattttagcccttcctcctatcataaatattggatagaatacagaatagcactttccaacttatgagataaaattactttggacctagaagtctatacttggccaacaatatttaaagcatgaggccaaatattgatgttttcagtcatggaatttatttccattatccaggatattaaaggagtcactcaagcaaaatgtagatgaaaaaggaagaagacagcaggataggctgaagtgaacagtggctgtaacccaagaaactggagttgaggattacaaggatacccacttggcaataagtgtagaaaacaatccaaccaaattattggtagactaagaatccagggagccagtgaagaaaaactttttgaaggatggaatgagttccattaaacagaattcatatgaagttggaggatcttagcaatatgatggagataaaattttgttcatacgagaaggaaagaaagataattactggctctgggaaagacaaagaaaaaaccaaactagatatcatagtcttaacgttaagcaactccccatgaaatgttgcatgattttagaaaactgaaaaaggaaaatccatttgatatgacgatagttccctttgagtgagtactaagatcataacattggatgtgtagaggaggaatgtaatctttacatattacttggctctggctcttcagagaataacaaatgttggtagtaatgcaatgctattttattttatacatttagaatatagaaatcactgaagtattatctgtaacataaatatctagtaatgtgaaaggcagaatatagctgattgattggatggtggaaggtagattggaaaatgaaagattgaagcaaggataagtggcaataatctcattgtgcagaggagattcaggagatctgcctaaagttgacagaataagaaaatacaggttagctatatttcaagttaaaaatgcaacaaatgtgataaactcacatgggatgacttacatcctttcctttcataaaagacttataaagagcgtataaaaataaatccagaaacagcaacagtagtcaggattgatagaaaccaaacaaaattagtttaggaaacaggttattgattcttgtaactaaaaagcattgaacatgtatggcatagtgttaggctggatttaagtgctcagacttatcagaggtttgtaactcagctctgctttcagtagtttccttctctccaggttctgtctcttggtgggaaagaaatggcatctgaggatattagacttaaaatgtccatagaatatttaatctcaaaagtagggcaatatctctgtctctctgcctccgtgtcaatccctgggaggaaaatatgatttgtttcagttttggctgtgtgcccactctgaaccagtcattgggtccatggtatgtggggtactctagccagcctgtgtcaagtgtacatgcctcttccagagagactgaatcactgaactgaccaattcacaaaaaaaacacacagaattggggctggttgaagggaggttgagaatcagctctcataatggcaaaacctgacctgaattgacatgagggtatttattgacattgatcccagttagtataaacattcatatctttttcttcagaaatattaatttgttcaattcaggggtgctgcctcagactctgtagcataggtaagttacatgtctgtgggtcaaatggacatagcacacagtggcttgtaattaaactgtcttgccagtaatccagagaaggttgcatgataaagtaaccccagcagaaagaggctggggctgtggtgacaagaattggtttagcatcacctggatccagcatgccaggggacttcaggggagttccttttaagacactccacagaaggcctccctcacagcaagtgtaagagatacaacccacagaaagtgagacagttcacgggggttccttttaatacactccacagaaggtctccctcgcagaaagtgtcagagatacaactcacagaaaatgagatggtttgcatgtataaaggaaagcagatctgatctatagagactgtggccttcaggtaaggaacttcattttcctactcccttatcctattctccacagcagagtggtagactggtgtattcccacaaggaaacaagtttgaatatatgtgtgagaagcctttaaaaatatttactaacttctgcatttaacaagatggaattaagtagtttctgtttgtttctcctttctgaaaccaagttaaagcaacaagagtaagaaatgcatgtagaggcttcgtctttaatgaagtgaagaaacatctataattctgagcttcaaaatccacaaagaggtgcggctaaatgtggtgagaatcctgggaaagaaactactgctgcattgaggagcacagaattttcctaaagcagcagcatatctggaagggcaaaagaaagggcaccttggttgcagccacaacatcacttcaaacattctggctttggaagcactcgtaaactctattatagttgcagagtgtcgtgtgagtgacaggagggcttaaggaggaaatgca[146 bp omitted]ggtggtgggcgcctgtagtcccagctactcaggaggctgaggcaggagaatagcgggaacctgggagttggagcttgcagtgagccaagatcccgccactgcactccagcctaagcgactgatcaagactccgtctcaaaaaaaaaaaaaggtttatcatgtaatagaggaaataaaatactgccagtgatgtgcaagaatgcaaagtaaagactaatccttgctactcaaaagtctgcgccatggaataacagcatcagcatcacctgagagtttgttaaaattccagaatcttgggccttaacccagacttaatcattcagaatctgcagttttacaagatctccagatgatctgtacacattaaggtttcagattcactggggtaaaaccaattatctgctagtgtaaagcactgtcctttgataaataagtagatcaggaaaagctcatttcattcaaaaattaaaaactccagccattcgcagatcttatcgataatggtaagctcaaaattacagaacaccccttcattaaaactgaacaaaatgaaaagaatgtgctagcatcatggaatgagaaaattgcactacctcatatcacatacttgaaaatataatacagaaatagtaagttcacactacaacaatgtgccagcatctttggtagtctctgccctctgggaaaagcagagcgagagaaagtctccataatggaggaaaagtcagaagaaaatctgaaaaaatttcactgatatatcctgatagttgtgtggggaaggggggagatgcaggcagcaatgaacaaacatacataaaattcctcttaagaatcctacttcactctagatagtagtttggataggaaagacaagttggtaatatatgttaaatatacctacgttttgacccaataatttattctctaaaaatattggtaaatctttacaaaagcatatgtacaagaatgttaattgcgatattatttaaaaaaattaaaaatcctagattcctcattattaccgccctctctaaatgcttatctgagatctacacttctggcaaagatggagtcctagggaataatttaatctcccacctgaaatactaaaaaacgacaccaggcaataaaataatgatccctgagaaattagaaacaaatgaggtgagtcctatgatttccccagacaactgcatgtagtttccaggctgtggtacagatctccacgaattaaggtgatggagctgggagtcagggagatcaaggtggctagagttcccaggatagagagtttgagaggagacagctctcagaaaagggaaaaaaaagcatctagtaatctacagtgtgttcctctttttttttttttttttttatctgagtacagatcagaatatggatgtgaagcaactacctgaaattggggaaagaacttaaagaactacaaggagaaataaacaaatccagaattataattggagatttcagcatgcctctcaatagaacatataaatagaaaaaatagtgaggatattgaagacttgaatattatcaccaacttgacctaactgacatttgtggaactattcaccccaagaagagtaaaacacacattcttttcaaatgaacccagaacattcacccagacagacaataattccagaccttaaaacacatatcagtaaactgaaaaggactgaagtcatacaaaatatgttttctaaccagaatggatttaaatcaataacagaaaagtaattagaaaacacccaaatatttagaacaaaagagcacacttttcagtaaccatatttctaagaagaaatcaaaagggaaaataaatattttgagttgaatgaaacttagagaaaagtacatcaaaatgtatgggatgtaccacagtacttggaaagaaatacagtggcactaaatgccaatgttacaaaacaaatgactcaaatcagtgactcctatttccacctaacaaattagaaatagaagagcaatgaaacccaacgttaacacaagaatggaaataataaaaatcagaatggaagccaatgaaatagaaacctgaaaaacaaaagctggttctttgagaaggtcaatgaaataaacaaaaaaattgcagacaattaaaaaagagattatacaagttatcactatctggaatggcagatgtgatatcactacaaatgatagttattaaatgaataaaagaatgttatgaactttatgcaaataatttgacaatttaaaaattcttgaaagaagctaacaaggttta[138 bp omitted]atggtgaaaccccgtctctattaaaaatacaaaaaaattagctgggcgtggtggtgggcgtctgtagtcccagctactcaggaggctgaagcaggagaatggcatgaacctgggaggcagagcttgcagtgagccaagatcccggcactgcactccagcctaggcgacagagcaagactctgtctcaaaaaaaaatggaatttgtaatttaagccttccaaatattttcagatgtctgtgtttactgcaactgtaattctggtatagtcaaggaacatagtttgcaaaataatttttttaatttatcaatatttatactctgtcttggtaaatgtttcatgaacacttaaaaggaatgtgtaccctgcctggattgtttggaatattttatattaacaaatgtcaaccaggtcaagttggttgattatgttgttgaggtcttctatatcttttttttttgtctacttgttctattaattaccaagaggagtgatgaagtctccaatgacaattgtcagtttgtctttctctcttttcagttctatcatttttccttgcaattcaatgtgtactcatttagaattacattttcccggccaggcgtggtggctcatgcctgtaatcccagcactttgggaggctgaggcaggtggatcacctgaggtcgggagttcaagaccaacctggtgaaaccccatctctactaaaaatacaaaaattagccaggcatggtggcaggcacctgtagtcccagctacttgggaggttgaagcaggaaaattgcttgaatccgggtggtggacgttgcagtgagctgagattgcgccattgcactccagcctgggagacaggagtgagacgaaactctgtcttaaaaaaatcaatcaataaataaatacattttcccagtaaacagaacttttatcattatgtaatctcactctttatccctgattgtattccttgttctgaagtctacttcatctgatagtaatatagtcatttctgcttttttgttaatgtttgcgtggtgtatctttttcccaccatttttctatgcctttatatttaaagtatgtttctggtagacagcatatagttggatactgctttttcattcaatcatagaatctctgtcgtttaactggtatatttagaccatttacatttgatatttttaaatatatagttagattaaaatctccaccttgttaactctatcctaattgttctgttctttagtttttgttctatttttgccttctatgatctaaatgaccatttttaataattctattttatattattgtttacatctcattgaacattttcagttgttacttctttaattggaatatacattcaaataatacacaacttaacatgttagtattttatatattcccattttctccgacatccattatgcttatcatattttactttcatatgctgtttacatggtacatttttactctaagacagccagttactttttaagataagtttttaaagttattaccttcatgtattccatttccgcatctcttcatttctttatgtatctccaaatgtctgctgtgtttcatattccttctgtttgaagaacttttcttgtagagtaggtcttctcttaatgtattattttctcagttttgtttctctgagagtatttctctatcagtttgaaagattttcatgagcatttcatgaagacagattttttccttcagctcttaaaagatgccattacattgtcctctggcctgcaatacttctgataagtctgctgtaattttcttaactttgttcttctatatgtaattttttcccctctctagcttgcttcaagattattttcagtagtttgaacataatatggctggggtggtgtgtgtttgtgtgtgtgtgtgagtgattttaatatttaccttccttgaggttctctgagcttcatagatttgtgttttctgggttcataaattttggaaacatattggccattatgtcttcaaatatttcttctgtcccatttattctgtatcttctgggattccaattatgtgtatgtgttggaccaatggatattttctcagagctcttggattctctgttccttcttgtcctaccctaccccacttatgtttcagtttgagtaacttttattgtcctaacgtcaagttcatttactttttccttgactatgtcaagtatattgatgagcctgttgaagacaattgttcatgtgcttattgagttttttcatttctagtatttccattttattctttttgttattgtttgagactgagtctcgctctgtctcccaggctggagtgcagtggcgtgatctcagctcactgcaagctccgcctcccgggttcccgctattctcctgcctcagcctcccgagtagctgggactacaggtgcccaccaccacgcctggctacttttttttgtattttttagtagagacggggtttcaccgtgttagccaggatggtctcgatctcctgagctcgtgatccgcccaccttggcctcccaaggtgctgggattacaggcgtgagccaccacgcccagccccattttatttttatagtttttgtgtctctgctcaaattatccatctaatcttgcctgttgtgcattttccattataactcttaagatactactcatagttcctttaaattccatgtcagtccaacagctatgtatttctgagtctagttctgatgaattttgtttcttggtggggtaaggtgttcatttttgcatttttgtatgccttgcattttttttttcctgaaagccaagtatcttctgtagaacaatagatatgaaggtaaatggatttaattcctggaaagggcatgtctttctatgtagcctttagtgtgtgggaggtggatgggtaagatttttataattatagctaggaattgaggaaggtttatggtttgttgttgctgtggttataagttcaccataggtttcagatatgaatagtgattccttatctttagggtccgaactggttttcccaagggtctatctcaatgtcagggtgatcttcaggtttaggtcccattggattatgcttcagatagcccatctatactaatatattttcattcattcaaatacttattgagtgctaaccattgaattatgtgtcattgtactaaacgctggaacttgtaactccccaaatactttattattgtttgccattattttatccatctgtaattttctctttagctttccaacttttgtgtgcctagcaaattcacattcttcctttaatattatctgcaaaaacaatccctgtccccatacctccatcaccatgaagtttatcatcctcttctccgtactacctatgcaccttatacagaattccatattttattacctgaattccctggtaaactgtaagtgtctgctggcaagaacagtgtcttattagtttacatatccacaggatttagcagtgattggtccagggtgtttacatgcacaacaaatgtgcagcgaaaatatttgctaatgaaagctggaaatctataggcatctattaaaagcaaaatactgtaataatgggctctcttacaacagtctaggagtaaagcaaaacatttttcttgccagttaagttttcaggactttaaaaaaacacaaagttgatttccttcttagtttggatatattttttaaattcatgtaatgcaaaataatttaaataataaatgattcggcctattaggatataattgagttccaagcagttgggaggacacatgaacccaaagttactttacctttattgcactttcacaaatgcctttaagagcttaagaataggagagaatagacaaaactagatgaaatgagaatttttgactgggccagaaataaagcagtgaggatatgcaattctcacaagtaattccaagttaagtttaactgtatcatgtattgccattctaatgctctcttgaaatccccaagaggagcaagaaatgcaataggcaatgagataagcctgaggaaattaggtgactgtgggcagggcattctcttgcttctccctagtcttcaggtgtgtcacaattcatttgggactgacatgtatttgtatggcagattggcagaggaattaacaagctagagggtgtgtgtagaaaagagggggaaaaaagacctgcctctccatgagttacctctgtgctgtttgctcacccatttgctccaaggggtggatttttatgcttgctttacaaatacgaaagaacaagtttaaatgggaagttagttgtactatcctgtatgcatgctcacccctcacaatttggattgttgttttatcaattgtggtcaaagttaggatgacctaacccatatacattccacacattccacaaagtcatcttaaacttaaggtattctcaaaaataacttttacagaaggaaaacttaaacagaagagcccaactgtgtatgatccaattacaaaaaagttatctgattttatttcttatatatttggcacaaacagcagagactgaaagctactacacatgttgaactgctgacaggaaaagaacccagtagataaatctaggctttccactccatatattagctggggctgccataacaaaacatcatagactgggtggcttaaacaacaatttacttctcacagttctgaagtctggaagtctgagaacaggtcgccagcatggttaggttctcgtagggttctcttcctgttctgtagacagctggcttcttcctgcatcctcacatggtgcagagagcaagcaggctttctgatgtctttttgagacgtagtctcgctctgtcgcccagggtggagtacagtggcgtgatcctggctcactgcaacctccgcctcctgggttcaagcgattcttctccttcagcctcccgagtagctgggactacaggcacatgccactgtgcctggctaattttttgtattttttttcagtggagacggggtttcaccgtgttagccaggattgtctcaatctcctgacctcatgatccactcgccttggcctcccaaagtgctgggattacaggcatgagccaccgggctcagcctgatgtctcttcttataaaggcactaatcccatcacgagggctccaccctcatgacctcatctaatcctaattgcctcccaaatgcctcatttccaagtaacatcacattgatggtgaggattttaacataattagttttgggagggacataaacattcagtccataacaactcatattacaccacttattgcataccagtattgttacatgaaaataccaatgtttactcatataaatatagatgatttatttccaaataaaacaatactgatttctcctggctctgaaatcctcattcttcactatatcttggttcttttactgatagcttgtctcagccaagttagacgttcacaccatgaagatcatatatcctcatatccgtggagatggtaaagtaaggtttctactgttacacaccattatgagtgacaactttatctacctaaagactcacttttctttattctcacccacaagtttgtcagctgaaagtggcaccctgttttgccgagaagttccttatatttgataattctagatctgagaaacagactcaaattcttttttctgtgaccttaaatcaggctcagagccctataatggacttcacaattctattttgttgtatgtgaccaataaattatctttaaaactatgctggaagtaaaatatcggtaattttttttttttttgacacagagtcttgctctgttgcccagactggagtgcagtggtgcaatctctgctcggtgcaacccccacctcctgggttcaagcgattctcctgcctcagcctctccagtagctgagattacaggtgcgcaccaccacgcccagctaattttgtattttttagtagagacagggtttcaccgtggtctcaaactcttgacctcgtgatccgcctgtctcagcctcccaaagtgctggggttacaggtgtaagccactgcgcccagccagtaattcttatcaaatgaaaaatgatcttcattcacaatgactgaccaaacttctgagtttccttcagttaatttcaaatcctgaggtcaaaatcaccaatgacttttgctctttggctttcaaagtgggacatatcatcaaatggtcccatatacacaaaatttacattatagacaaatacatatttgccatatgtttgatagcctcattcgttgattttatagatttaaaacaaccttaggctttttcttcagaatgtgtattctgatgtcgaatcagggatgaactccgactatatgccttcccacatttactacattcatagggtttctctgaagaatgacttctctgatgtcgaataaggtctgagccactgctaaatgccttcccacattcattacattcatagggtttctctccagtatgacttctttcatgtagaataagagatgtgcgctgactaaaggccttaccacatgttttgcatgtatatggcttctctccagtgtgaattctttcatgttgggcgaggtgtgcactctggctgaaggccttcccacactgatcacattcatagggtctatcttcagtatgaattctcttatgtcgtgtgagagatattcggtggctgaaggcttttccacattcctcacactggtagggtttttctccagtatgaattctttgatgttcaataagaaatgattggcggccgaaaactttactacatttattgcatttgaaaggtttctcttcagaatgaatattctgatgtattttaaggtttgcagttccagaaaacatcttcccacattccttacactcaaatagtttctttttctttgtatgaactttctgatgttgaataagggatgaatgccgattgcagaccttctcacatttattgcatctgtatagtttttctccattatgaattcttagatgcagaataagggttgaaagccgcctgaagaacttgtcacatttatcacatttgtacggtttctctgaagtgtgaattctctggtgaagcatcaggggtgaaatcctattaaataatttcccacattttctgcatttaaaaggattctctaaatggtgacttctttgctgtagactctgacttaaggccttcgcattttcagggattttctctccagcatgaattcttttatgtacaacaaagactgatttctttttgaagcctctcccacatttattatatttatgtgttttctttccattgtgaattttcttatgaagtaaaagggatgacatctgattgaaggcttttccgcactttctgcactggcagacattcccaacaacatgaattttctgatgtatattgaaagactgacattgactcaaggccttcccacagtcaagaatttcctttccatcatgaattctcatatgtagaataagggttgttctttgattgaagctttccccacatttattgcattcatggcttttctttccactgtgaattctctgatgaagtaggatggatgagatctgtctgaaagcttttctacaattactgcattcaaaaggcttctctcctgtatgaatgttctgatgaagtttaagagagaagcttcgactaaaggttttaccacagtcattacattttaaaggtttcttccctgaatgccctttcttaggttttactaggactgaatttttgttgcagccactctttcgtgtaggagctttttgttgtgcagaaactagtttctggcagatgctttgcccagatttgttgcattgatttggaggtaacttcttggtctcacatttagaccccgagtctgaaagacataaaggaattaaatgtttctccttttccatgctgaaaaaatgaagattctacaatataaatgtaattatcattattaatcacaacaacaattatgattaccaaaacataactttttagtgttttattgtggttttgatgactatactaaaggctttacagagatatttaataaccagagttcagaagagtgtaatttgaaaatgaataagattttatttatacgataacttttatgccatatacggcacattgaactccacaggttgttcaatggataaatgtatgtttattagagaatgtgtccagaaaaggtaagtctacagagacagaagataagtggttgcctggggctcaaggtaggaatggggattaactgaaaatggacatgaagaatcttacaggggtgataaaaatgttctaatactggatcatattgatggttacacactctgtaaatttatccaaaatcatttaattatattctagatatagtgacttttatgatgtttacctcaataaagttgtagattttaaaaaatgtattcttaagatcaaatttaaaaagaactagtaaaaattagaattgagtacagtcacgggttgcttaacaatgggaacatgttgtaagacatgcattgtcaggcaatttcatcattgtgcaaacatcttacagtagatttacataaacctagatagtatagcctactatacacctatgttatattgtatagcctgttcctaggctacaaacctgtacatgacgttactgtattgaatcctgtaggcaattttaacactatgataagtatttatgtatctaaatatacataaatgtagaaaaggtacagtacaaataacagttttatgatcttatagaaccatggccatatatgtagtctgttgttgactggactgaaacatcattatgcagcatatgactgtatttagatatttacaaaggtgaagtctttagcaagaagcaggaaaagctcagaaaaataggtaagagattagactaaaagaaggaatctattttgtagtaaaatagatcaatatggctggcatagggtgccaaagtccaaggtgatataaaataactacttgtatggcaaactgactataaacctgagtgaatgtggcatgataaacacaggctttagaactatgctatccaatatagtagccattagtcacctgtagctactgaggaattgaaatgtggctggtttgaggtatactatgagtataaaacatatgccagactgtgaaaatttactacaaaaaagtataaagtatctcattgtaaaaatgctggttatatgatataatatgttggatatattaggttaaatacatatattactaaaattaattttacctgtttgtattaggaagttcctatattgctataaataaatacttgagtgggtaatttataaacaaaagaggttcaattggctcctggttcagtaggctgtacaagcatggtgctggcacctccttggcttctggggaggcctcagtgagctcttactcatggtgaaagacgaagtaggagaaggcacatcacatggtgaaacaaggagagagagtgtggaggaggtgccacatattacaacgatcagattttgtaagaatcactccctattgctaagacaccaccaagggaatggtgctaagccattcatgagaaacccacccccatgatccaatcacctcccacagaccccacctccaacactgaggatgaaatttcaacatgagatttggtgagaaatccacccccatgatccaatcacctcccaccagaccccacctccaacactgaggattaatttcaacatgagatttggtgagaaacccacccccatgatccaatcacctcccacagaccccacctccaacactgaggatgaaatttcaacatgagatttggtgagaaatccacccccatgatccaatcacctcccacagaccccacctccaacactgaggattaaatttcaacatgagatttggtgagaaatccacccccatgatccaatcacctcccacagaccccacctccaacactgaggattaaatttcaacatgagatttggtgagaaacccacccccatgatccaatcacctcccacagaccccacctccaacactgaggattaaatttcaacatgagatttggtgagaaatccacccccatgatccaatcacctcccacagaccccacctccaacactgaggattaaatttcaacatgagatttggtgagaaatccacccccatgatccaatcacctcccacagaccccacctccaacactgaggattaaatttcaacatgagatttggtgagaaacccacccccatgatccaatcacctcccacagaccccacctccaacactgagtattaaatttcaacatgagatttggtgagaaatccacccccatgatccaatcacctcccacagaccccacctccaacactgaggattaaatttcaacatgagatttggtgagaaatccacccccatgatccaatcacctcccaccaggccccacctccaacactgaggattaaatttcaacatgagatttggtgagaaatccacccccatgatccaatcacctcccaccagaccccacctccaacactgaggattaaatttcaacatgagatttggtgagaaatccacccccatgatccaatcacctcccacagaccccacctccaacactgaggattaaatttcaacatgagatttggtgagaaatccacccccatgatccaatcacctcccaccaggccccacctccaacactgaggattaaatttcaacatgagatttggtgagaaatccacccccatgatccaatcacctcccaccaggccccacctccaacactgaggattaaatttcaacatgagatttggtgagaaatccacccccatgatccaatcacctcccaccagaccccacctccaacactgaggattaaatttcaacatgagatttggtgagaaatccacccccatgatccaatcacctcccaccagaccccacctccaacactgaggattaaatttcaacatgagatttggtgagaaatccacccccatgatccaatcacctcccacagaccccacctccaacactgaggattaaatttcaacatgagatttggtgagaaatccacccccatgatccaatcacctcccacagaccccacctccaacactgaggattaaatttcaacatgagatttggtggggacacagatccaaaccatatcactggttttagatttttatttgaatgtggatactaaagattttttcagtacatatgtggctcacattatatttctatttcataggtgtgctttaaaggcagacattactgaattaactgaggtgtttttcatttaactgcataatcttgtgacacacttgttaactctattaccataagcatattatcttgaaaatatagataataatcacgtacctcacaaggttttcatgagaattagaaataatgtgcgagatttctggcacatgctatgacctctaatctgccattccagtattcaaaaagctgagaaccaaagtcttctttccttttttcttttcctttttgaatacatatttggagtgaaaccccatctgaaatgcaatgaggctattcatagcctccatttattgctcttaggaagtctagtctttgcagctatctcaatgtgtttgattttggggtactgctccagcccctgctgggtatgttatgccacacatagtatatgacctgttcacctttctaaaatctgcaccattctgaattctg
